United States Patent Application Publication US 2022/0281922 A1 - sequence listing, part 2

SEQ ID NO: 24032 - DNA, 21 bp, Artificial Sequence
  source: /note="Description of Artificial Sequence: Synthetic oligonucleotide"
agtgatgcgaatgttgggatg

SEQ ID NO: 24033 - DNA, 21 bp, Artificial Sequence
  source: /note="Description of Artificial Sequence: Synthetic oligonucleotide"
tctgatgctcctccttatagg

SEQ ID NO: 24034 - DNA, 21 bp, Artificial Sequence
  source: /note="Description of Artificial Sequence: Synthetic oligonucleotide"
tctgattgtattactcattct

SEQ ID NO: 24035 - DNA, 21 bp, Artificial Sequence
  source: /note="Description of Artificial Sequence: Synthetic oligonucleotide"
tcggatgatgggccgagtgct

SEQ ID NO: 24036 - DNA, 21 bp, Artificial Sequence
  source: /note="Description of Artificial Sequence: Synthetic oligonucleotide"
tcggatgatttggttccgaag

SEQ ID NO: 24037 - DNA, 21 bp, Artificial Sequence
  source: /note="Description of Artificial Sequence: Synthetic oligonucleotide"
tctgatgatcgtgagaattgt

SEQ ID NO: 24038 - DNA, 21 bp, Artificial Sequence
  source: /note="Description of Artificial Sequence: Synthetic oligonucleotide"
agtgatgattctaagaatacg

SEQ ID NO: 24039 - DNA, 21 bp, Artificial Sequence
  source: /note="Description of Artificial Sequence: Synthetic oligonucleotide"
tctgatgagtctggtatgcct

SEQ ID NO: 24040 - DNA, 21 bp, Artificial Sequence
  source: /note="Description of Artificial Sequence: Synthetic oligonucleotide"
tcggatggtcctcgtttgagt

SEQ ID NO: 24041 - DNA, 21 bp, Artificial Sequence
  source: /note="Description of Artificial Sequence: Synthetic oligonucleotide"
agtgatgggtcttcgcttgct

SEQ ID NO: 24042 - DNA, 21 bp, Artificial Sequence
  source: /note="Description of Artificial Sequence: Synthetic oligonucleotide"
agtgatcatcgttatctgatt

SEQ ID NO: 24043 - DNA, 21 bp, Artificial Sequence
  source: /note="Description of Artificial Sequence: Synthetic oligonucleotide"
tcggatcatagttctcggacg

SEQ ID NO: 24044 - DNA, 21 bp, Artificial Sequence
  source: /note="Description of Artificial Sequence: Synthetic oligonucleotide"
tctgatattccgcgtccgagt

SEQ ID NO: 24045 - DNA, 21 bp, Artificial Sequence
  source: /note="Description of Artificial Sequence: Synthetic oligonucleotide"
tcggatattgttgcgtctccg

SEQ ID NO: 24046 - DNA, 21 bp, Artificial Sequence
  source: /note="Description of Artificial Sequence: Synthetic oligonucleotide"
tctgataagttttttccgagt

SEQ ID NO: 24047 - DNA, 21 bp, Artificial Sequence
  source: /note="Description of Artificial Sequence: Synthetic oligonucleotide"
tctgatctgaataagcttgcg

SEQ ID NO: 24048 - DNA, 21 bp, Artificial Sequence
  source: /note="Description of Artificial Sequence: Synthetic oligonucleotide"
tctgatctgcctatgctggtt

SEQ ID NO: 24049 - DNA, 21 bp, Artificial Sequence
  source: /note="Description of Artificial Sequence: Synthetic oligonucleotide"
tctgatcttcgtatggttgct

SEQ ID NO: 24050 - DNA, 21 bp, Artificial Sequence
  source: /note="Description of Artificial Sequence: Synthetic oligonucleotide"
agtgatctttcgcggcctctt

SEQ ID NO: 24051 - DNA, 21 bp, Artificial Sequence
  source: /note="Description of Artificial Sequence: Synthetic oligonucleotide"
agtgatatggctactaagttg

SEQ ID NO: 24052 - DNA, 21 bp, Artificial Sequence
  source: /note="Description of Artificial Sequence: Synthetic oligonucleotide"
agtgatatgcctgttcctcgt

SEQ ID NO: 24053 - DNA, 21 bp, Artificial Sequence
  source: /note="Description of Artificial Sequence: Synthetic oligonucleotide"
tcggatatgacggctcggggg

SEQ ID NO: 24054 - DNA, 21 bp, Artificial Sequence
  source: /note="Description of Artificial Sequence: Synthetic oligonucleotide"
agtgataattatgagcgtacg

SEQ ID NO: 24055 - DNA, 21 bp, Artificial Sequence
  source: /note="Description of Artificial Sequence: Synthetic oligonucleotide"
tctgatcctgggcgtggtgcg

SEQ ID NO: 24056 - DNA, 21 bp, Artificial Sequence
  source: /note="Description of Artificial Sequence: Synthetic oligonucleotide"
agtgatcctaagtattcggtg

SEQ ID NO: 24057 - DNA, 21 bp, Artificial Sequence
  source: /note="Description of Artificial Sequence: Synthetic oligonucleotide"
tctgatccgaatacgtatatt

SEQ ID NO: 24058 - DNA, 21 bp, Artificial Sequence
  source: /note="Description of Artificial Sequence: Synthetic oligonucleotide"
tctgatcctaggaggactagt

SEQ ID NO: 24059 - DNA, 21 bp, Artificial Sequence
  source: /note="Description of Artificial Sequence: Synthetic oligonucleotide"
agtgatccgtcgttgccggtt

SEQ ID NO: 24060 - DNA, 21 bp, Artificial Sequence
  source: /note="Description of Artificial Sequence: Synthetic oligonucleotide"
tctgatccggtgttgggggcg

SEQ ID NO: 24061 - DNA, 21 bp, Artificial Sequence
  source: /note="Description of Artificial Sequence: Synthetic oligonucleotide"
tctgatcagcctactaaggct

SEQ ID NO: 24062 - DNA, 21 bp, Artificial Sequence
  source: /note="Description of Artificial Sequence: Synthetic oligonucleotide"
agtgatcagcggattttgcct

SEQ ID NO: 24063 - DNA, 21 bp, Artificial Sequence
  source: /note="Description of Artificial Sequence: Synthetic oligonucleotide"
tctgatcagtctctgacgtat

SEQ ID NO: 24064 - DNA, 21 bp, Artificial Sequence
  source: /note="Description of Artificial Sequence: Synthetic oligonucleotide"
agtgatcaggttaagagttct

SEQ ID NO: 24065 - DNA, 21 bp, Artificial Sequence
  source: /note="Description of Artificial Sequence: Synthetic oligonucleotide"
tcggatcgggagtctcgtatt

SEQ ID NO: 24066 - DNA, 21 bp, Artificial Sequence
  source: /note="Description of Artificial Sequence: Synthetic oligonucleotide"
tcggatagggaggttgatccg

SEQ ID NO: 24067 - DNA, 21 bp, Artificial Sequence
  source: /note="Description of Artificial Sequence: Synthetic oligonucleotide"
agtgatcgtgggattcgtgat

SEQ ID NO: 24068 - DNA, 21 bp, Artificial Sequence
  source: /note="Description of Artificial Sequence: Synthetic oligonucleotide"
tctgatagggggtatcctaag

SEQ ID NO: 24069 - DNA, 21 bp, Artificial Sequence
  source: /note="Description of Artificial Sequence: Synthetic oligonucleotide"
tcggatcggctttgtgatgag

SEQ ID NO: 24070 - DNA, 21 bp, Artificial Sequence
  source: /note="Description of Artificial Sequence: Synthetic oligonucleotide"
agtgatcggcttcagacggtt

SEQ ID NO: 24071 - DNA, 21 bp, Artificial Sequence
  source: /note="Description of Artificial Sequence: Synthetic oligonucleotide"
tctgataggatgatgactttt

SEQ ID NO: 24072 - DNA, 21 bp, Artificial Sequence
  source: /note="Description of Artificial Sequence: Synthetic oligonucleotide"
agtgatcgtatgtctagtcct

SEQ ID NO: 24073 - DNA, 21 bp, Artificial Sequence
  source: /note="Description of Artificial Sequence: Synthetic oligonucleotide"
tcggataggccggcgttgttg

SEQ ID NO: 24074 - DNA, 21 bp, Artificial Sequence
  source: /note="Description of Artificial Sequence: Synthetic oligonucleotide"
tctgatcggcctggtctgtat

SEQ ID NO: 24075 - DNA, 21 bp, Artificial Sequence
  source: /note="Description of Artificial Sequence: Synthetic oligonucleotide"
tcggatcgtcagccttttact

SEQ ID NO: 24076 - DNA, 21 bp, Artificial Sequence
  source: /note="Description of Artificial Sequence: Synthetic oligonucleotide"
agtgatcgtcgtgctatgagt

SEQ ID NO: 24077 - DNA, 21 bp, Artificial Sequence
  source: /note="Description of Artificial Sequence: Synthetic oligonucleotide"
tctgatcgtcgtaatatggcg

SEQ ID NO: 24078 - DNA, 21 bp, Artificial Sequence
  source: /note="Description of Artificial Sequence: Synthetic oligonucleotide"
agtgatcggagtgctacgtct

SEQ ID NO: 24079 - DNA, 21 bp, Artificial Sequence
  source: /note="Description of Artificial Sequence: Synthetic oligonucleotide"
tctgatcgttcggataagccg

SEQ ID NO: 24080 - DNA, 21 bp, Artificial Sequence
  source: /note="Description of Artificial Sequence: Synthetic oligonucleotide"
tctgattcggctcatgctcct

SEQ ID NO: 24081 - DNA, 21 bp, Artificial Sequence
  source: /note="Description of Artificial Sequence: Synthetic oligonucleotide"
tcggattctgggcagtctgcg

SEQ ID NO: 24082 - DNA, 21 bp, Artificial Sequence
  source: /note="Description of Artificial Sequence: Synthetic oligonucleotide"
tctgattcgaaggtgggtccg

SEQ ID NO: 24083 - DNA, 21 bp, Artificial Sequence
  source: /note="Description of Artificial Sequence: Synthetic oligonucleotide"
tcggattctcgtctgggggcg

SEQ ID NO: 24084 - DNA, 21 bp, Artificial Sequence
  source: /note="Description of Artificial Sequence: Synthetic oligonucleotide"
agtgattctcggagggagtat

SEQ ID NO: 24085 - DNA, 21 bp, Artificial Sequence
  source: /note="Description of Artificial Sequence: Synthetic oligonucleotide"
tctgattcgtatggttctcgt

SEQ ID NO: 24086 - DNA, 21 bp, Artificial Sequence
  source: /note="Description of Artificial Sequence: Synthetic oligonucleotide"
tcggatagttatccgcgtatt

SEQ ID NO: 24087 - DNA, 21 bp, Artificial Sequence
  source: /note="Description of Artificial Sequence: Synthetic oligonucleotide"
tcggatacgaagctgtatccg

SEQ ID NO: 24088 - DNA, 21 bp, Artificial Sequence
  source: /note="Description of Artificial Sequence: Synthetic oligonucleotide"
tctgatacgatgagggcggag

SEQ ID NO: 24089 - DNA, 21 bp, Artificial Sequence
  source: /note="Description of Artificial Sequence: Synthetic oligonucleotide"
tcggatacgaggctgacgcgt

SEQ ID NO: 24090 - DNA, 21 bp, Artificial Sequence
  source: /note="Description of Artificial Sequence: Synthetic oligonucleotide"
tcggatactaggaatggggcg

SEQ ID NO: 24091 - DNA, 21 bp, Artificial Sequence
  source: /note="Description of Artificial Sequence: Synthetic oligonucleotide"
agtgatactacgctgctggat

SEQ ID NO: 24092 - DNA, 21 bp, Artificial Sequence
  source: /note="Description of Artificial Sequence: Synthetic oligonucleotide"
tctgatacgtatatgcggttg

SEQ ID NO: 24093 - DNA, 21 bp, Artificial Sequence
  source: /note="Description of Artificial Sequence: Synthetic oligonucleotide"
tcggatgttgctgctaggagt

SEQ ID NO: 24094 - DNA, 21 bp, Artificial Sequence
  source: /note="Description of Artificial Sequence: Synthetic oligonucleotide"
tctgatgttgctatgcgggcg

SEQ ID NO: 24095 - DNA, 21 bp, Artificial Sequence
  source: /note="Description of Artificial Sequence: Synthetic oligonucleotide"
agtgatgttaatcaggggttg

SEQ ID NO: 24096 - DNA, 21 bp, Artificial Sequence
  source: /note="Description of Artificial Sequence: Synthetic oligonucleotide"
agtgaggcgtttcggccggcg

SEQ ID NO: 24097 - DNA, 21 bp, Artificial Sequence
  source: /note="Description of Artificial Sequence: Synthetic oligonucleotide"
tctgaggctccgaatgatcgg

SEQ ID NO: 24098 - DNA, 21 bp, Artificial Sequence
  source: /note="Description of Artificial Sequence: Synthetic oligonucleotide"
agtgaggcgtctgcgtctagg

SEQ ID NO: 24099 - DNA, 21 bp, Artificial Sequence
  source: /note="Description of Artificial Sequence: Synthetic oligonucleotide"
agtgaggcttggctggcgagt

SEQ ID NO: 24100 - DNA, 21 bp, Artificial Sequence
  source: /note="Description of Artificial Sequence: Synthetic oligonucleotide"
agtgaggatggtgatattaag

SEQ ID NO: 24101 - DNA, 21 bp, Artificial Sequence
  source: /note="Description of Artificial Sequence: Synthetic oligonucleotide"
tcggaggatcgtagtcggacg

SEQ ID NO: 24102 - DNA, 21 bp, Artificial Sequence
  source: /note="Description of Artificial Sequence: Synthetic oligonucleotide"
agtgaggagtcgtggggttat

SEQ ID NO: 24103 - DNA, 21 bp, Artificial Sequence
  source: /note="Description of Artificial Sequence: Synthetic oligonucleotide"
tctgagtttgttcggatgcct

SEQ ID NO: 24104 - DNA, 21 bp, Artificial Sequence
  source: /note="Description of Artificial Sequence: Synthetic oligonucleotide"
tctgagggggatcatgcgctt

SEQ ID NO: 24105 - DNA, 21 bp, Artificial Sequence
  source: /note="Description of Artificial Sequence: Synthetic oligonucleotide"
tcggagggttttaatgcgatg

SEQ ID NO: 24106 - DNA, 21 bp, Artificial Sequence
  source: /note="Description of Artificial Sequence: Synthetic oligonucleotide"
agtgaggggcatcggggtcct

SEQ ID NO: 24107 - DNA, 21 bp, Artificial Sequence
  source: /note="Description of Artificial Sequence: Synthetic oligonucleotide"
agtgagggtactgttcgggag

SEQ ID NO: 24108 - DNA, 21 bp, Artificial Sequence
  source: /note="Description of Artificial Sequence: Synthetic oligonucleotide"
tctgagattcataggcttccg

SEQ ID NO: 24109 - DNA, 21 bp, Artificial Sequence
  source: /note="Description of Artificial Sequence: Synthetic oligonucleotide"
tcggagattaatcgtcctgag

SEQ ID NO: 24110 - DNA, 21 bp, Artificial Sequence
  source: /note="Description of Artificial Sequence: Synthetic oligonucleotide"
tcggagattactcttccgctt

SEQ ID NO: 24111 - DNA, 21 bp, Artificial Sequence
  source: /note="Description of Artificial Sequence: Synthetic oligonucleotide"
tctgagaagtcgaatgagagt

SEQ ID NO: 24112 - DNA, 21 bp, Artificial Sequence
  source: /note="Description of Artificial Sequence: Synthetic oligonucleotide"
tcggagaagtatgctgctatg

SEQ ID NO: 24113 - DNA, 21 bp, Artificial Sequence
  source: /note="Description of Artificial Sequence: Synthetic oligonucleotide"
agtgagctggaggctcggacg

SEQ ID NO: 24114 - DNA, 21 bp, Artificial Sequence
  source: /note="Description of Artificial Sequence: Synthetic oligonucleotide"
tctgagcttcatgggcttctg

SEQ ID NO: 24115 - DNA, 21 bp, Artificial Sequence
  source: /note="Description of Artificial Sequence: Synthetic oligonucleotide"
tctgagttgaagacgaggcct

SEQ ID NO: 24116 - DNA, 21 bp, Artificial Sequence
  source: /note="Description of Artificial Sequence: Synthetic oligonucleotide"
agtgagcttaggtcggtgggt

SEQ ID NO: 24117 - DNA, 21 bp, Artificial Sequence
  source: /note="Description of Artificial Sequence: Synthetic oligonucleotide"
agtgagatggatttgcggtct

SEQ ID NO: 24118 - DNA, 21 bp, Artificial Sequence
  source: /note="Description of Artificial Sequence: Synthetic oligonucleotide"
tcggagaatcagatgaggtct

SEQ ID NO: 24119 - DNA, 21 bp, Artificial Sequence
  source: /note="Description of Artificial Sequence: Synthetic oligonucleotide"
agtgagaatacgtctgatcat

SEQ ID NO: 24120 - DNA, 21 bp, Artificial Sequence
  source: /note="Description of Artificial Sequence: Synthetic oligonucleotide"
tctgagcctattcgtactgtt

SEQ ID NO: 24121 - DNA, 21 bp, Artificial Sequence
  source: /note="Description of Artificial Sequence: Synthetic oligonucleotide"
agtgagcctaggcggactccg

SEQ ID NO: 24122 - DNA, 21 bp, Artificial Sequence
  source: /note="Description of Artificial Sequence: Synthetic oligonucleotide"
tcggagcctcggtcgcatccg

SEQ ID NO: 24123 - DNA, 21 bp, Artificial Sequence
  source: /note="Description of Artificial Sequence: Synthetic oligonucleotide"
agtgagccttctgattatgtg

SEQ ID NO: 24124 - DNA, 21 bp, Artificial Sequence
  source: /note="Description of Artificial Sequence: Synthetic oligonucleotide"
tcggagccttctctgtcgtct

SEQ ID NO: 24125 - DNA, 21 bp, Artificial Sequence
  source: /note="Description of Artificial Sequence: Synthetic oligonucleotide"
tctgagccgacggcgaggaat

SEQ ID NO: 24126 - DNA, 21 bp, Artificial Sequence
  source: /note="Description of Artificial Sequence: Synthetic oligonucleotide"
tcggagccgactatgattgtg

SEQ ID NO: 24127 - DNA, 21 bp, Artificial Sequence
  source: /note="Description of Artificial Sequence: Synthetic oligonucleotide"
tcggagccgtatggtcgtctt

SEQ ID NO: 24128 - DNA, 21 bp, Artificial Sequence
  source: /note="Description of Artificial Sequence: Synthetic oligonucleotide"
tctgagccttatcatgctgcg

SEQ ID NO: 24129 - DNA, 21 bp, Artificial Sequence
  source: /note="Description of Artificial Sequence: Synthetic oligonucleotide"
agtgagcagtcgcggttgttg

SEQ ID NO: 24130 - DNA, 21 bp, Artificial Sequence
  source: /note="Description of Artificial Sequence: Synthetic oligonucleotide"
tcggagcgtttttttaatggt

SEQ ID NO: 24131 - DNA, 21 bp, Artificial Sequence
  source: /note="Description of Artificial Sequence: Synthetic oligonucleotide"
tctgagcgtcatgcttgttct

SEQ ID NO: 24132 - DNA, 21 bp, Artificial Sequence
  source: /note="Description of Artificial Sequence: Synthetic oligonucleotide"
tctgagcgtccggcggcggct

SEQ ID NO: 24133 - DNA, 21 bp, Artificial Sequence
  source: /note="Description of Artificial Sequence: Synthetic oligonucleotide"
tcggagaggcctatgcctaag

SEQ ID NO: 24134 - DNA, 21 bp, Artificial Sequence
  source: /note="Description of Artificial Sequence: Synthetic oligonucleotide"
tctgagaggacgctgattatg

SEQ ID NO: 24135 - DNA, 21 bp, Artificial Sequence
  source: /note="Description of Artificial Sequence: Synthetic oligonucleotide"
tctgagcgggttgctgcgcat

SEQ ID NO: 24136 - DNA, 21 bp, Artificial Sequence
  source: /note="Description of Artificial Sequence: Synthetic oligonucleotide"
tctgagagggttgagaagcat

SEQ ID NO: 24137 - DNA, 21 bp, Artificial Sequence
  source: /note="Description of Artificial Sequence: Synthetic oligonucleotide"
tctgagagtagttcgcagaat

SEQ ID NO: 24138 - DNA, 21 bp, Artificial Sequence
  source: /note="Description of Artificial Sequence: Synthetic oligonucleotide"
tcggagacgacgtctcgtcat

SEQ ID NO: 24139 - DNA, 21 bp, Artificial Sequence
  source: /note="Description of Artificial Sequence: Synthetic oligonucleotide"
agtgaggtgggttctgcgacg

SEQ ID NO: 24140 - DNA, 21 bp, Artificial Sequence
  source: /note="Description of Artificial Sequence: Synthetic oligonucleotide"
tctgaggttaatcttccgtcg

SEQ ID NO: 24141 - DNA, 21 bp, Artificial Sequence
  source: /note="Description of Artificial Sequence: Synthetic oligonucleotide"
agtgaggttcgggctacggcg

SEQ ID NO: 24142 - DNA, 21 bp, Artificial Sequence
  source: /note="Description of Artificial Sequence: Synthetic oligonucleotide"
tcggaggtttctccgcggggg

SEQ ID NO: 24143 - DNA, 21 bp, Artificial Sequence
  source: /note="Description of Artificial Sequence: Synthetic oligonucleotide"
tctgagtggaaggttgagcat

SEQ ID NO: 24144 - DNA, 21 bp, Artificial Sequence
  source: /note="Description of Artificial Sequence: Synthetic oligonucleotide"
tcggagtattatcatagtgcg

SEQ ID NO: 24145 - DNA, 21 bp, Artificial Sequence
  source: /note="Description of Artificial Sequence: Synthetic oligonucleotide"
agttttgcgccggcgcatgat

SEQ ID NO: 24146 - DNA, 21 bp, Artificial Sequence
  source: /note="Description of Artificial Sequence: Synthetic oligonucleotide"
tcgtttgcgagttttccgggt

SEQ ID NO: 24147 - DNA, 21 bp, Artificial Sequence
  source: /note="Description of Artificial Sequence: Synthetic oligonucleotide"
agttttgatgatggtggtccg

SEQ ID NO: 24148 - DNA, 21 bp, Artificial Sequence
  source: /note="Description of Artificial Sequence: Synthetic oligonucleotide"
agttttgatggtgtgcctttt

SEQ ID NO: 24149 - DNA, 21 bp, Artificial Sequence
  source: /note="Description of Artificial Sequence: Synthetic oligonucleotide"
tcgtttgatcatactctgggg

SEQ ID NO: 24150 - DNA, 21 bp, Artificial Sequence
  source: /note="Description of Artificial Sequence: Synthetic oligonucleotide"
tcgtttgataagtttgcggag

SEQ ID NO: 24151 - DNA, 21 bp, Artificial Sequence
  source: /note="Description of Artificial Sequence: Synthetic oligonucleotide"
agttttgatatggctcttaag

SEQ ID NO: 24152 - DNA, 21 bp, Artificial Sequence
  source: /note="Description of Artificial Sequence: Synthetic oligonucleotide"
tcttttgattctaatcggacg

SEQ ID NO: 24153 - DNA, 21 bp, Artificial Sequence
  source: /note="Description of Artificial Sequence: Synthetic oligonucleotide"
tcgtttgagtctaagatgcat

SEQ ID NO: 24154 - DNA, 21 bp, Artificial Sequence
  source: /note="Description of Artificial Sequence: Synthetic oligonucleotide"
agttttgagacgattgggcgt

SEQ ID NO: 24155 - DNA, 21 bp, Artificial Sequence
  source: /note="Description of Artificial Sequence: Synthetic oligonucleotide"
agttttgagacgtgggcgccg

SEQ ID NO: 24156 - DNA, 21 bp, Artificial Sequence
  source: /note="Description of Artificial Sequence: Synthetic oligonucleotide"
tcttttgggatgaagccgtcg

SEQ ID NO: 24157 - DNA, 21 bp, Artificial Sequence
  source: /note="Description of Artificial Sequence: Synthetic oligonucleotide"
tcttttggtaatgggactgtt

SEQ ID NO: 24158 - DNA, 21 bp, Artificial Sequence
  source: /note="Description of Artificial Sequence: Synthetic oligonucleotide"
tcttttggttctggtccttcg

SEQ ID NO: 24159 - DNA, 21 bp, Artificial Sequence
  source: /note="Description of Artificial Sequence: Synthetic oligonucleotide"
tcgtttcatgaggcgactaat

SEQ ID NO: 24160 - DNA, 21 bp, Artificial Sequence
  source: /note="Description of Artificial Sequence: Synthetic oligonucleotide"
tcttttattacggatgctcct

SEQ ID NO: 24161 - DNA, 21 bp, Artificial Sequence
  source: /note="Description of Artificial Sequence: Synthetic oligonucleotide"
tcttttaaggatcattatgct

SEQ ID NO: 24162 - DNA, 21 bp, Artificial Sequence
  source: /note="Description of Artificial Sequence: Synthetic oligonucleotide"
tcttttaagtcgactaatctg

SEQ ID NO: 24163 - DNA, 21 bp, Artificial Sequence
  source: /note="Description of Artificial Sequence: Synthetic oligonucleotide"
agttttaagactggttctgcg

SEQ ID NO: 24164 - DNA, 21 bp, Artificial Sequence
  source: /note="Description of Artificial Sequence: Synthetic oligonucleotide"
tcgtttatgccgcagttggag

SEQ ID NO: 24165 - DNA, 21 bp, Artificial Sequence
  source: /note="Description of Artificial Sequence: Synthetic oligonucleotide"
tcgtttaatgcgggggcttct

SEQ ID NO: 24166 - DNA, 21 bp, Artificial Sequence
  source: /note="Description of Artificial Sequence: Synthetic oligonucleotide"
agttttcctgataggcctctg

SEQ ID NO: 24167 - DNA, 21 bp, Artificial Sequence
  source: /note="Description of Artificial Sequence: Synthetic oligonucleotide"
tcttttccgggtgagcgtgtt

SEQ ID NO: 24168 - DNA, 21 bp, Artificial Sequence
  source: /note="Description of Artificial Sequence: Synthetic oligonucleotide"
tcttttcagggggctcgtact

SEQ ID NO: 24169 - DNA, 21 bp, Artificial Sequence
  source: /note="Description of Artificial Sequence: Synthetic oligonucleotide"
agttttcagagtcatggtgat

SEQ ID NO: 24170 - DNA, 21 bp, Artificial Sequence
  source: /note="Description of Artificial Sequence: Synthetic oligonucleotide"
agttttcggggtgggattagt

SEQ ID NO: 24171 - DNA, 21 bp, Artificial Sequence
  source: /note="Description of Artificial Sequence: Synthetic oligonucleotide"
tcttttcgtcaggctagttgt

SEQ ID NO: 24172 - DNA, 21 bp, Artificial Sequence
  source: /note="Description of Artificial Sequence: Synthetic oligonucleotide"
agttttcggcagccgcagagt

SEQ ID NO: 24173 - DNA, 21 bp, Artificial Sequence
  source: /note="Description of Artificial Sequence: Synthetic oligonucleotide"
tcgttttctgatcctcagaat

SEQ ID NO: 24174 - DNA, 21 bp, Artificial Sequence
  source: /note="Description of Artificial Sequence: Synthetic oligonucleotide"
agttttagtggtcctaagtcg

SEQ ID NO: 24175 - DNA, 21 bp, Artificial Sequence
  source: /note="Description of Artificial Sequence: Synthetic oligonucleotide"
tctttttcgaatccttcgcag

SEQ ID NO: 24176 - DNA, 21 bp, Artificial Sequence
  source: /note="Description of Artificial Sequence: Synthetic oligonucleotide"
tcgttttcgcgtgcgacttct

SEQ ID NO: 24177 - DNA, 21 bp, Artificial Sequence
  source: /note="Description of Artificial Sequence: Synthetic oligonucleotide"
tctttttcgtctactgcttct

SEQ ID NO: 24178 - DNA, 21 bp, Artificial Sequence
  source: /note="Description of Artificial Sequence: Synthetic oligonucleotide"
agttttactggttctgttgcg

SEQ ID NO: 24179 - DNA, 21 bp, Artificial Sequence
  source: /note="Description of Artificial Sequence: Synthetic oligonucleotide"
tcgtttactgggtctgttcct

SEQ ID NO: 24180 - DNA, 21 bp, Artificial Sequence
  source: /note="Description of Artificial Sequence: Synthetic oligonucleotide"
tcttttactcaggcgttggag

SEQ ID NO: 24181 - DNA, 21 bp, Artificial Sequence
  source: /note="Description of Artificial Sequence: Synthetic oligonucleotide"
agttttactcgtcaggaggct

SEQ ID NO: 24182 - DNA, 21 bp, Artificial Sequence
  source: /note="Description of Artificial Sequence: Synthetic oligonucleotide"
tcttttacgacgggtggtgtg

SEQ ID NO: 24183 - DNA, 21 bp, Artificial Sequence
  source: /note="Description of Artificial Sequence: Synthetic oligonucleotide"
agttttacgacgcaggcgact

SEQ ID NO: 24184 - DNA, 21 bp, Artificial Sequence
  source: /note="Description of Artificial Sequence: Synthetic oligonucleotide"
tcgtttgtggatcgtgctggt

SEQ ID NO: 24185 - DNA, 21 bp, Artificial Sequence
  source: /note="Description of Artificial Sequence: Synthetic oligonucleotide"
tcgtttgttcagactacgcct

SEQ ID NO: 24186 - DNA, 21 bp, Artificial Sequence
  source: /note="Description of Artificial Sequence: Synthetic oligonucleotide"
tcgtttgttaggacgagtact

SEQ ID NO: 24187 - DNA, 21 bp, Artificial Sequence
  source: /note="Description of Artificial Sequence: Synthetic oligonucleotide"
agtggtgctgctcctacgtat

SEQ ID NO: 24188 - DNA, 21 bp, Artificial Sequence
  source: /note="Description of Artificial Sequence: Synthetic oligonucleotide"
tctggggcgtttcatttgagt

SEQ ID NO: 24189 - DNA, 21 bp, Artificial Sequence
  source: /note="Description of Artificial Sequence: Synthetic oligonucleotide"
tctggggctcagccgatgttt

SEQ ID NO: 24190 - DNA, 21 bp, Artificial Sequence
  source: /note="Description of Artificial Sequence: Synthetic oligonucleotide"
agtggggcgcaggttccgtct

SEQ ID NO: 24191 - DNA, 21 bp, Artificial Sequence
  source: /note="Description of Artificial Sequence: Synthetic oligonucleotide"
tcgggtgcgagtgttattgct

SEQ ID NO: 24192 - DNA, 21 bp, Artificial Sequence
  source: /note="Description of Artificial Sequence: Synthetic oligonucleotide"
tcgggggctacgcatccttat

SEQ ID NO: 24193 - DNA, 21 bp, Artificial Sequence
  source: /note="Description of Artificial Sequence: Synthetic oligonucleotide"
tcgggtgctgttagtgggctt

SEQ ID NO: 24194 - DNA, 21 bp, Artificial Sequence
  source: /note="Description of Artificial Sequence: Synthetic oligonucleotide"
tctggtgcgtattcttcgtct

SEQ ID NO: 24195 - DNA, 21 bp, Artificial Sequence
  source: /note="Description of Artificial Sequence: Synthetic oligonucleotide"
tcggggtgttctgagctgcct

SEQ ID NO: 24196 - DNA, 21 bp, Artificial Sequence
  source: /note="Description of Artificial Sequence: Synthetic oligonucleotide"
tctggtgatcctaaggatatt

SEQ ID NO: 24197 - DNA, 21 bp, Artificial Sequence
  source: /note="Description of Artificial Sequence: Synthetic oligonucleotide"
agtggggatcagggttcgagg

SEQ ID NO: 24198 - DNA, 21 bp, Artificial Sequence
  source: /note="Description of Artificial Sequence: Synthetic oligonucleotide"
tctggggaggctaagtcgggg

SEQ ID NO: 24199 - DNA, 21 bp, Artificial Sequence
  source: /note="Description of Artificial Sequence: Synthetic oligonucleotide"
agtggtgagttgggtggtttg

SEQ ID NO: 24200 - DNA, 21 bp, Artificial Sequence
  source: /note="Description of Artificial Sequence: Synthetic oligonucleotide"
tcgggtgagttgaatcctccg

SEQ ID NO: 24201 - DNA, 21 bp, Artificial Sequence
  source: /note="Description of Artificial Sequence: Synthetic oligonucleotide"
tctggggagcttcgttatatt

SEQ ID NO: 24202 - DNA, 21 bp, Artificial Sequence
  source: /note="Description of Artificial Sequence: Synthetic oligonucleotide"
tctggggagaggacgtcgggt

SEQ ID NO: 24203 - DNA, 21 bp, Artificial Sequence
  source: /note="Description of Artificial Sequence: Synthetic oligonucleotide"
agtggttttggggcgaagcag

SEQ ID NO: 24204 - DNA, 21 bp, Artificial Sequence
  source: /note="Description of Artificial Sequence: Synthetic oligonucleotide"
tctgggtttggtcctcttact

SEQ ID NO: 24205 - DNA, 21 bp, Artificial Sequence
  source: /note="Description of Artificial Sequence: Synthetic oligonucleotide"
tctgggggtgcgcttggttat

SEQ ID NO: 24206 - DNA, 21 bp, Artificial Sequence
  source: /note="Description of Artificial Sequence: Synthetic oligonucleotide"
tcggggggtgcttcgactact

SEQ ID NO: 24207 - DNA, 21 bp, Artificial Sequence
  source: /note="Description of Artificial Sequence: Synthetic oligonucleotide"
tctggtggggggacgtcgttg

SEQ ID NO: 24208 - DNA, 21 bp, Artificial Sequence
  source: /note="Description of Artificial Sequence: Synthetic oligonucleotide"
agtgggggtcatttgacgatt

SEQ ID NO: 24209 - DNA, 21 bp, Artificial Sequence
  source: /note="Description of Artificial Sequence: Synthetic oligonucleotide"
tcgggggggcttcgggcggcg

SEQ ID NO: 24210 - DNA, 21 bp, Artificial Sequence
  source: /note="Description of Artificial Sequence: Synthetic oligonucleotide"
tctggtgggcaggagtggact

SEQ ID NO: 24211 - DNA, 21 bp, Artificial Sequence
  source: /note="Description of Artificial Sequence: Synthetic oligonucleotide"
tctgggggttcgtttactact

SEQ ID NO: 24212 - DNA, 21 bp, Artificial Sequence
  source: /note="Description of Artificial Sequence: Synthetic oligonucleotide"
agtgggattgggtctcggcag

SEQ ID NO: 24213 - DNA, 21 bp, Artificial Sequence
  source: /note="Description of Artificial Sequence: Synthetic oligonucleotide"
tcggggattctgcagtcgagt

SEQ ID NO: 24214 - DNA, 21 bp, Artificial Sequence
  source: /note="Description of Artificial Sequence: Synthetic oligonucleotide"
tcggggattagtctgcggccg

SEQ ID NO: 24215 - DNA, 21 bp, Artificial Sequence
  source: /note="Description of Artificial Sequence: Synthetic oligonucleotide"
agtggtattagtcgtattgat

SEQ ID NO: 24216 - DNA, 21 bp, Artificial Sequence
  source: /note="Description of Artificial Sequence: Synthetic oligonucleotide"
tcgggtaaggcttctcctggg

SEQ ID NO: 24217 - DNA, 21 bp, Artificial Sequence
  source: /note="Description of Artificial Sequence: Synthetic oligonucleotide"
agtgggaagcatactatgaat

SEQ ID NO: 24218 - DNA, 21 bp, Artificial Sequence
  source: /note="Description of Artificial Sequence: Synthetic oligonucleotide"
tctggtaagttggttgtttct

SEQ ID NO: 24219 - DNA, 21 bp, Artificial Sequence
  source: /note="Description of Artificial Sequence: Synthetic oligonucleotide"
tctggtaagatgggtgtttat

SEQ ID NO: 24220 - DNA, 21 bp, Artificial Sequence
  source: /note="Description of Artificial Sequence: Synthetic oligonucleotide"
tcgggtaagaatccgggttat

SEQ ID NO: 24221 - DNA, 21 bp, Artificial Sequence
  source: /note="Description of Artificial Sequence: Synthetic oligonucleotide"
agtggtaagccgatggggacg

SEQ ID NO: 24222 - DNA, 21 bp, Artificial Sequence
  source: /note="Description of Artificial Sequence: Synthetic oligonucleotide"
tctgggaagtcgggttttgag

SEQ ID NO: 24223 - DNA, 21 bp, Artificial Sequence
  source: /note="Description of Artificial Sequence: Synthetic oligonucleotide"
agtgggttggctgttcatcct

SEQ ID NO: 24224 - DNA, 21 bp, Artificial Sequence
  source: /note="Description of Artificial Sequence: Synthetic oligonucleotide"
tcggggctggaggatgttgtt

SEQ ID NO: 24225 - DNA, 21 bp, Artificial Sequence
  source: /note="Description of Artificial Sequence: Synthetic oligonucleotide"
tctggtttggggatttcgact

SEQ ID NO: 24226 - DNA, 21 bp, Artificial Sequence
  source: /note="Description of Artificial Sequence: Synthetic oligonucleotide"
agtgggctgcatgctctgact

SEQ ID NO: 24227 - DNA, 21 bp, Artificial Sequence
  source: /note="Description of Artificial Sequence: Synthetic oligonucleotide"
agtggtctgattgctacgggg

SEQ ID NO: 24228 - DNA, 21 bp, Artificial Sequence
  source: /note="Description of Artificial Sequence: Synthetic oligonucleotide"
tcggggcttaatccgaagtct

SEQ ID NO: 24229 - DNA, 21 bp, Artificial Sequence
  source: /note="Description of Artificial Sequence: Synthetic oligonucleotide"
agtggtctgaatcggactgtt

SEQ ID NO: 24230 - DNA, 21 bp, Artificial Sequence
  source: /note="Description of Artificial Sequence: Synthetic oligonucleotide"
agtggtctgtctgcttatttg

SEQ ID NO: 24231 - DNA, 21 bp, Artificial Sequence
  source: /note="Description of Artificial Sequence: Synthetic oligonucleotide"
tcggggatgggtcatgtggct

SEQ ID NO: 24232 - DNA, 21 bp, Artificial Sequence
  source: /note="Description of Artificial Sequence: Synthetic oligonucleotide"
tcgggtatgctgatgcggggg

SEQ ID NO: 24233 - DNA, 21 bp, Artificial Sequence
  source: /note="Description of Artificial Sequence: Synthetic oligonucleotide"
tcgggtatgactgattcgccg

SEQ ID NO: 24234 - DNA, 21 bp, Artificial Sequence
  source: /note="Description of Artificial Sequence: Synthetic oligonucleotide"
agtggtaatggggttctgttg

SEQ ID NO: 24235 - DNA, 21 bp, Artificial Sequence
  source: /note="Description of Artificial Sequence: Synthetic oligonucleotide"
agtggtaatctgggttatgct

SEQ ID NO: 24236 - DNA, 21 bp, Artificial Sequence
  source: /note="Description of Artificial Sequence: Synthetic oligonucleotide"
agtgggaatatgagtgctggg

SEQ ID NO: 24237 - DNA, 21 bp, Artificial Sequence
  source: /note="Description of Artificial Sequence: Synthetic oligonucleotide"
tcgggtaatccgtctcaggct

SEQ ID NO: 24238 - DNA, 21 bp, Artificial Sequence
  source: /note="Description of Artificial Sequence: Synthetic oligonucleotide"
agtgggaatacttattctagg

SEQ ID NO: 24239 - DNA, 21 bp, Artificial Sequence
  source: /note="Description of Artificial Sequence: Synthetic oligonucleotide"
tctggtcctgatatttttctt

SEQ ID NO: 24240 - DNA, 21 bp, Artificial Sequence
  source: /note="Description of Artificial Sequence: Synthetic oligonucleotide"
agtgggccgcatggggggcag

SEQ ID NO: 24241 - DNA, 21 bp, Artificial Sequence
  source: /note="Description of Artificial Sequence: Synthetic oligonucleotide"
tcgggtcctcttaattctcct

SEQ ID NO: 24242 - DNA, 21 bp, Artificial Sequence
  source: /note="Description of Artificial Sequence: Synthetic oligonucleotide"
agtggtcctaggcttggtccg

SEQ ID NO: 24243 - DNA, 21 bp, Artificial Sequence
  source: /note="Description of Artificial Sequence: Synthetic oligonucleotide"
agtgggccgagtgtgctgcgg

SEQ ID NO: 24244 - DNA, 21 bp, Artificial Sequence
  source: /note="Description of Artificial Sequence: Synthetic oligonucleotide"
tctgggccgacgcatgcgatg

SEQ ID NO: 24245 - DNA, 21 bp, Artificial Sequence
  source: /note="Description of Artificial Sequence: Synthetic oligonucleotide"
tcgggtcctgtgggtcggact

SEQ ID NO: 24246 - DNA, 21 bp, Artificial Sequence
  source: /note="Description of Artificial Sequence: Synthetic oligonucleotide"
tctggtccgtataagctggag

SEQ ID NO: 24247 - DNA, 21 bp, Artificial Sequence
  source: /note="Description of Artificial Sequence: Synthetic oligonucleotide"
agtggtccgtatcctattaag

SEQ ID NO: 24248 - DNA, 21 bp, Artificial Sequence
  source: /note="Description of Artificial Sequence: Synthetic oligonucleotide"
tcggggcaggctagtttgact

SEQ ID NO: 24249 - DNA, 21 bp, Artificial Sequence
  source: /note="Description of Artificial Sequence: Synthetic oligonucleotide"
agtggtcagtctatttcgcct

SEQ ID NO: 24250 - DNA, 21 bp, Artificial Sequence
  source: /note="Description of Artificial Sequence: Synthetic oligonucleotide"
tcggggcaggtgccgtcggcg

SEQ ID NO: 24251 - DNA, 21 bp, Artificial Sequence
  source: /note="Description of Artificial Sequence: Synthetic oligonucleotide"
tctgggcagtatccttctatt

SEQ ID NO: 24252 - DNA, 21 bp, Artificial Sequence
  source: /note="Description of Artificial Sequence: Synthetic oligonucleotide"
tctggtcgtggtccgccgccg

SEQ ID NO: 24253 - DNA, 21 bp, Artificial Sequence
  source: /note="Description of Artificial Sequence: Synthetic oligonucleotide"
agtgggcgtcattctgatgat

SEQ ID NO: 24254 - DNA, 21 bp, Artificial Sequence
  source: /note="Description of Artificial Sequence: Synthetic oligonucleotide"
tcgggtcgtccttcgccggcg

SEQ ID NO: 24255 - DNA, 21 bp, Artificial Sequence
  source: /note="Description of Artificial Sequence: Synthetic oligonucleotide"
tcggggcggcagcctacggtt

SEQ ID NO: 24256 - DNA, 21 bp, Artificial Sequence
  source: /note="Description of Artificial Sequence: Synthetic oligonucleotide"
tcggggaggacgattattacg

SEQ ID NO: 24257 - DNA, 21 bp, Artificial Sequence
  source: /note="Description of Artificial Sequence: Synthetic oligonucleotide"
tctggtagggtgacgaatagt

SEQ ID NO: 24258 - DNA, 21 bp, Artificial Sequence
  source: /note="Description of Artificial Sequence: Synthetic oligonucleotide"
tctgggagtgatccgaggact

SEQ ID NO: 24259 - DNA, 21 bp, Artificial Sequence
  source: /note="Description of Artificial Sequence: Synthetic oligonucleotide"
tcgggtagtggtgtgccgcag

SEQ ID NO: 24260 - DNA, 21 bp, Artificial Sequence
  source: /note="Description of Artificial Sequence: Synthetic oligonucleotide"
tctggttctaaggattctcat

SEQ ID NO: 24261 - DNA, 21 bp, Artificial Sequence
  source: /note="Description of Artificial Sequence: Synthetic oligonucleotide"
agtgggtcgaagggggcgttt

SEQ ID NO: 24262 - DNA, 21 bp, Artificial Sequence
  source: /note="Description of Artificial Sequence: Synthetic oligonucleotide"
tctggttcgatgtctcaggtg

SEQ ID NO: 24263 - DNA, 21 bp, Artificial Sequence
  source: /note="Description of Artificial Sequence: Synthetic oligonucleotide"
tctgggtcgaatatgcttaag

SEQ ID NO: 24264 - DNA, 21 bp, Artificial Sequence
  source: /note="Description of Artificial Sequence: Synthetic oligonucleotide"
agtgggtctcctcgtatttcg

SEQ ID NO: 24265 - DNA, 21 bp, Artificial Sequence
  source: /note="Description of Artificial Sequence: Synthetic oligonucleotide"
agtggtagtcagggtacgagg

SEQ ID NO: 24266 - DNA, 21 bp, Artificial Sequence
  source: /note="Description of Artificial Sequence: Synthetic oligonucleotide"
tctgggtcgaggattatggag

SEQ ID NO: 24267 - DNA, 21 bp, Artificial Sequence
  source: /note="Description of Artificial Sequence: Synthetic oligonucleotide"
tcggggtctcggaatcttggg

SEQ ID NO: 24268 - DNA, 21 bp, Artificial Sequence
  source: /note="Description of Artificial Sequence: Synthetic oligonucleotide"
tcgggttcgcggaatatggtg

SEQ ID NO: 24269 - DNA, 21 bp, Artificial Sequence
  source: /note="Description of Artificial Sequence: Synthetic oligonucleotide"
tctgggtcgcggtcgatgctt

SEQ ID NO: 24270 - DNA, 21 bp, Artificial Sequence
  source: /note="Description of Artificial Sequence: Synthetic oligonucleotide"
tctggtagtcgtgttgctcct

SEQ ID NO: 24271 - DNA, 21 bp, Artificial Sequence
  source: /note="Description of Artificial Sequence: Synthetic oligonucleotide"
agtggttcgtctgcgtctcgg

SEQ ID NO: 24272 - DNA, 21 bp, Artificial Sequence
  source: /note="Description of Artificial Sequence: Synthetic oligonucleotide"
tcgggtagttctggtagtgct

SEQ ID NO: 24273 - DNA, 21 bp, Artificial Sequence
  source: /note="Description of Artificial Sequence: Synthetic oligonucleotide"
tctgggagtagtaagtcgatg

SEQ ID NO: 24274 - DNA, 21 bp, Artificial Sequence
  source: /note="Description of Artificial Sequence: Synthetic oligonucleotide"
agtgggagttctacgtgtatt

SEQ ID NO: 24275 - DNA, 21 bp, Artificial Sequence
  source: /note="Description of Artificial Sequence: Synthetic oligonucleotide"
tcggggtctagtacgattaat

SEQ ID NO: 24276 - DNA, 21 bp, Artificial Sequence
  source: /note="Description of Artificial Sequence: Synthetic oligonucleotide"
tcgggtagttctacgccgcag

SEQ ID NO: 24277 - DNA, 21 bp, Artificial Sequence
  source: /note="Description of Artificial Sequence: Synthetic oligonucleotide"
tctggtagtgtgtggccggat

SEQ ID NO: 24278 - DNA, 21 bp, Artificial Sequence
  source: /note="Description of Artificial Sequence: Synthetic oligonucleotide"
tcgggttcgtatcctcgggat

SEQ ID NO: 24279 - DNA, 21 bp, Artificial Sequence
  source: /note="Description of Artificial Sequence: Synthetic oligonucleotide"
tctgggacggctcttactttg

SEQ ID NO: 24280 - DNA, 21 bp, Artificial Sequence
  source: /note="Description of Artificial Sequence: Synthetic oligonucleotide"
tcgggtactgatcatctgctt

SEQ ID NO: 24281 - DNA, 21 bp, Artificial Sequence
  source: /note="Description of Artificial Sequence: Synthetic oligonucleotide"
tcggggacgggtcaggatggt

SEQ ID NO: 24282 - DNA, 21 bp, Artificial Sequence
  source: /note="Description of Artificial Sequence: Synthetic oligonucleotide"
agtgggactggtagggggact

SEQ ID NO: 24283 - DNA, 21 bp, Artificial Sequence
  source: /note="Description of Artificial Sequence: Synthetic oligonucleotide"
agtggtacgctgacgcagaag

SEQ ID NO: 24284 - DNA, 21 bp, Artificial Sequence
  source: /note="Description of Artificial Sequence: Synthetic oligonucleotide"
tcggggacgccgatgtctcgt

SEQ ID NO: 24285 - DNA, 21 bp, Artificial Sequence
  source: /note="Description of Artificial Sequence: Synthetic oligonucleotide"
agtgggactagtgtgtttgct

SEQ ID NO: 24286 - DNA, 21 bp, Artificial Sequence
  source: /note="Description of Artificial Sequence: Synthetic oligonucleotide"
tcggggactactgcgtgggcg

SEQ ID NO: 24287 - DNA, 21 bp, Artificial Sequence
  source: /note="Description of Artificial Sequence: Synthetic oligonucleotide"
tcggggactactggttatagg

SEQ ID NO: 24288 - DNA, 21 bp, Artificial Sequence
  source: /note="Description of Artificial Sequence: Synthetic oligonucleotide"
tcgggtacggtgtatcgggtt

SEQ ID NO: 24289 - DNA, 21 bp, Artificial Sequence
  source: /note="Description of Artificial Sequence: Synthetic oligonucleotide"
tctggggtggggatgatttct

SEQ ID NO: 24290 - DNA, 21 bp, Artificial Sequence
  source: /note="Description of Artificial Sequence: Synthetic oligonucleotide"
agtggggttcatccttttccg

SEQ ID NO: 24291 - DNA, 21 bp, Artificial Sequence
  source: /note="Description of Artificial Sequence: Synthetic oligonucleotide"
agtggggtgattaagacgtct

SEQ ID NO: 24292 - DNA, 21 bp, Artificial Sequence
  source: /note="Description of Artificial Sequence: Synthetic oligonucleotide"
tctggtgtgaatctttctagt

SEQ ID NO: 24293 - DNA, 21 bp, Artificial Sequence
  source: /note="Description of Artificial Sequence: Synthetic oligonucleotide"
agtggggtgcagtctggtccg

SEQ ID NO: 24294 - DNA, 21 bp, Artificial Sequence
  source: /note="Description of Artificial Sequence: Synthetic oligonucleotide"
tcgggtgtgcggcaggtggct

SEQ ID NO: 24295 - DNA, 21 bp, Artificial Sequence
  source: /note="Description of Artificial Sequence: Synthetic oligonucleotide"
tcgggtgtgtcgatgctgcct

SEQ ID NO: 24296 - DNA, 21 bp, Artificial Sequence
  source: /note="Description of Artificial Sequence: Synthetic oligonucleotide"
tctggggtttcgaggtatgct

SEQ ID NO: 24297 - DNA, 21 bp, Artificial Sequence
  source: /note="Description of Artificial Sequence: Synthetic oligonucleotide"
agtggtgtgagttatgttgag

SEQ ID NO: 24298 - DNA, 21 bp, Artificial Sequence
  source: /note="Description of Artificial Sequence: Synthetic oligonucleotide"
agtggttatccgaatttggat

SEQ ID NO: 24299 - DNA, 21 bp, Artificial Sequence
  source: /note="Description of Artificial Sequence: Synthetic oligonucleotide"
agtcatgctgcgcagttgcct

SEQ ID NO: 24300 - DNA, 21 bp, Artificial Sequence
  source: /note="Description of Artificial Sequence: Synthetic oligonucleotide"
agtcatgcgaatcttcatgcg

SEQ ID NO: 24301 - DNA, 21 bp, Artificial Sequence
  source: /note="Description of Artificial Sequence: Synthetic oligonucleotide"
tcgcatgcgaatacgtctagt

SEQ ID NO: 24302 - DNA, 21 bp, Artificial Sequence
  source: /note="Description of Artificial Sequence: Synthetic oligonucleotide"
tctcatgcgtctaattatccg

SEQ ID NO: 24303 - DNA, 21 bp, Artificial Sequence
  source: /note="Description of Artificial Sequence: Synthetic oligonucleotide"
agtcatgcgagtgtgcgttcg

SEQ ID NO: 24304 - DNA, 21 bp, Artificial Sequence
  source: /note="Description of Artificial Sequence: Synthetic oligonucleotide"
agtcatgctacgacgccgtct

SEQ ID NO: 24305 - DNA, 21 bp, Artificial Sequence
  source: /note="Description of Artificial Sequence: Synthetic oligonucleotide"
tcgcatgcggttcggatgggg

SEQ ID NO: 24306 - DNA, 21 bp, Artificial Sequence
  source: /note="Description of Artificial Sequence: Synthetic oligonucleotide"
tcgcatgataatcgtggggtg

SEQ ID NO: 24307 - DNA, 21 bp, Artificial Sequence
  source: /note="Description of Artificial Sequence: Synthetic oligonucleotide"
tctcatgagaatggttctact

SEQ ID NO: 24308 - DNA, 21 bp, Artificial Sequence
  source: /note="Description of Artificial Sequence: Synthetic oligonucleotide"
tctcatgagccgcatactcgt

SEQ ID NO: 24309 - DNA, 21 bp, Artificial Sequence
  source: /note="Description of Artificial Sequence: Synthetic oligonucleotide"
tcgcatgagtctttggggatg

SEQ ID NO: 24310 - DNA, 21 bp, Artificial Sequence
  source: /note="Description of Artificial Sequence: Synthetic oligonucleotide"
tctcattttcctatggcgcct

SEQ ID NO: 24311 - DNA, 21 bp, Artificial Sequence
  source: /note="Description of Artificial Sequence: Synthetic oligonucleotide"
tctcattttagtgcggcggag

SEQ ID NO: 24312 - DNA, 21 bp, Artificial Sequence
  source: /note="Description of Artificial Sequence: Synthetic oligonucleotide"
agtcatggtccgcctcgttct

SEQ ID NO: 24313 - DNA, 21 bp, Artificial Sequence
  source: /note="Description of Artificial Sequence: Synthetic oligonucleotide"
tcgcatggtccgtatccgtat

SEQ ID NO: 24314 - DNA, 21 bp, Artificial Sequence
  source: /note="Description of Artificial Sequence: Synthetic oligonucleotide"
tcgcatgggtcggcggtgaat

SEQ ID NO: 24315 - DNA, 21 bp, Artificial Sequence
  source: /note="Description of Artificial Sequence: Synthetic oligonucleotide"
tctcatggttcgtttccgtct

SEQ ID NO: 24316 - DNA, 21 bp, Artificial Sequence
  source: /note="Description of Artificial Sequence: Synthetic oligonucleotide"
tctcatgggacgaagtcgacg

SEQ ID NO: 24317 - DNA, 21 bp, Artificial Sequence
  source: /note="Description of Artificial Sequence: Synthetic oligonucleotide"
tcgcatcatgggtctattatt

SEQ ID NO: 24318 - DNA, 21 bp, Artificial Sequence
  source: /note="Description of Artificial Sequence: Synthetic oligonucleotide"
tctcatattcagcttgctccg

SEQ ID NO: 24319 - DNA, 21 bp, Artificial Sequence
  source: /note="Description of Artificial Sequence: Synthetic oligonucleotide"
agtcataagcgtatggtggat

SEQ ID NO: 24320 - DNA, 21 bp, Artificial Sequence
  source: /note="Description of Artificial Sequence: Synthetic oligonucleotide"
tctcataagtcgcctactcct

SEQ ID NO: 24321 - DNA, 21 bp, Artificial Sequence
  source: /note="Description of Artificial Sequence: Synthetic oligonucleotide"
tctcatcttgagattgatatg

SEQ ID NO: 24322 - DNA, 21 bp, Artificial Sequence
  source: /note="Description of Artificial Sequence: Synthetic oligonucleotide"
tcgcatttgaatcttcgtcct

SEQ ID NO: 24323 - DNA, 21 bp, Artificial Sequence
  source: /note="Description of Artificial Sequence: Synthetic oligonucleotide"
agtcatctgccggtgtcgatg

SEQ ID NO: 24324 - DNA, 21 bp, Artificial Sequence
  source: /note="Description of Artificial Sequence: Synthetic oligonucleotide"
agtcatttgcagaatcggatt

SEQ ID NO: 24325 - DNA, 21 bp, Artificial Sequence
  source: /note="Description of Artificial Sequence: Synthetic oligonucleotide"
tctcatatgacgggttcgacg

SEQ ID NO: 24326 - DNA, 21 bp, Artificial Sequence
  source: /note="Description of Artificial Sequence: Synthetic oligonucleotide"
agtcataatgcgtttccgact

SEQ ID NO: 24327 - DNA, 21 bp, Artificial Sequence
  source: /note="Description of Artificial Sequence: Synthetic oligonucleotide"
tctcataatgcgcttatggat

SEQ ID NO: 24328 - DNA, 21 bp, Artificial Sequence
  source: /note="Description of Artificial Sequence: Synthetic oligonucleotide"
agtcataatattcctgctggt

SEQ ID NO: 24329 - DNA, 21 bp, Artificial Sequence
  source: /note="Description of Artificial Sequence: Synthetic oligonucleotide"
tcgcataataagctgtcgagt

SEQ ID NO: 24330 - DNA, 21 bp, Artificial Sequence
  source: /note="Description of Artificial Sequence: Synthetic oligonucleotide"
tctcatcctgcgatttctgct

SEQ ID NO: 24331 - DNA, 21 bp, Artificial Sequence
  source: /note="Description of Artificial Sequence: Synthetic oligonucleotide"
tcgcatcctgcgctgcctccg

SEQ ID NO: 24332 - DNA, 21 bp, Artificial Sequence
  source: /note="Description of Artificial Sequence: Synthetic oligonucleotide"
tctcatccggatcttagtcct

SEQ ID NO: 24333 - DNA, 21 bp, Artificial Sequence
  source: /note="Description of Artificial Sequence: Synthetic oligonucleotide"
tctcatcctatgctgcctact

SEQ ID NO: 24334 - DNA, 21 bp, Artificial Sequence
  source: /note="Description of Artificial Sequence: Synthetic oligonucleotide"
tcgcatccgatgatgcctgcg

SEQ ID NO: 24335 - DNA, 21 bp, Artificial Sequence
  source: /note="Description of Artificial Sequence: Synthetic oligonucleotide"
agtcatcctccgcttcgtctg

SEQ ID NO: 24336 - DNA, 21 bp, Artificial Sequence
  source: /note="Description of Artificial Sequence: Synthetic oligonucleotide"
agtcatccttcgagtgagcct

SEQ ID NO: 24337 - DNA, 21 bp, Artificial Sequence
  source: /note="Description of Artificial Sequence: Synthetic oligonucleotide"
agtcatcaggcgcgtgctcct

SEQ ID NO: 24338 - DNA, 21 bp, Artificial Sequence
  source: /note="Description of Artificial Sequence: Synthetic oligonucleotide"
tctcataggggggatgagcat

SEQ ID NO: 24339 - DNA, 21 bp, Artificial Sequence
  source: /note="Description of Artificial Sequence: Synthetic oligonucleotide"
tctcatcggcctagtacgctg

SEQ ID NO: 24340 - DNA, 21 bp, Artificial Sequence
  source: /note="Description of Artificial Sequence: Synthetic oligonucleotide"
agtcataggcctacttcttct

SEQ ID NO: 24341 - DNA, 21 bp, Artificial Sequence
  source: /note="Description of Artificial Sequence: Synthetic oligonucleotide"
tctcatagtgcgctgatgggg

SEQ ID NO: 24342 - DNA, 21 bp, Artificial Sequence
  source: /note="Description of Artificial Sequence: Synthetic oligonucleotide"
tctcatagtgcgatgcagcat

SEQ ID NO: 24343 - DNA, 21 bp, Artificial Sequence
  source: /note="Description of Artificial Sequence: Synthetic oligonucleotide"
tctcattctcattctgatgct

SEQ ID NO: 24344 - DNA, 21 bp, Artificial Sequence
  source: /note="Description of Artificial Sequence: Synthetic oligonucleotide"
agtcattcgttgggtggtaat

SEQ ID NO: 24345 - DNA, 21 bp, Artificial Sequence
  source: /note="Description of Artificial Sequence: Synthetic oligonucleotide"
agtcattcgcctgatattaag

SEQ ID NO: 24346 - DNA, 21 bp, Artificial Sequence
  source: /note="Description of Artificial Sequence: Synthetic oligonucleotide"
tctcattcgcctttgttgccg

SEQ ID NO: 24347 - DNA, 21 bp, Artificial Sequence
  source: /note="Description of Artificial Sequence: Synthetic oligonucleotide"
tcgcatagttcgattatggtg

SEQ ID NO: 24348 - DNA, 21 bp, Artificial Sequence
  source: /note="Description of Artificial Sequence: Synthetic oligonucleotide"
agtcattcgtctcggctgatg

SEQ ID NO: 24349 - DNA, 21 bp, Artificial Sequence
  source: /note="Description of Artificial Sequence: Synthetic oligonucleotide"
agtcatactcatggtaatccg

SEQ ID NO: 24350 - DNA, 21 bp, Artificial Sequence
  source: /note="Description of Artificial Sequence: Synthetic oligonucleotide"
tctcatactaaggtgtcgcat

SEQ ID NO: 24351 - DNA, 21 bp, Artificial Sequence
  source: /note="Description of Artificial Sequence: Synthetic oligonucleotide"
tcgcatacgccgcgggcttcg

SEQ ID NO: 24352 - DNA, 21 bp, Artificial Sequence
  source: /note="Description of Artificial Sequence: Synthetic oligonucleotide"
agtcatacgcgtcctgatgct

SEQ ID NO: 24353 - DNA, 21 bp, Artificial Sequence
  source: /note="Description of Artificial Sequence: Synthetic oligonucleotide"
agtcatactagtctgccgcgg

SEQ ID NO: 24354 - DNA, 21 bp, Artificial Sequence
  source: /note="Description of Artificial Sequence: Synthetic oligonucleotide"
agtcatacttctcttgttatt

SEQ ID NO: 24355 - DNA, 21 bp, Artificial Sequence
  source: /note="Description of Artificial Sequence: Synthetic oligonucleotide"
tctcatgtggcgggtcatgct

SEQ ID NO: 24356 - DNA, 21 bp, Artificial Sequence
  source: /note="Description of Artificial Sequence: Synthetic oligonucleotide"
tctcatgttgcttcgaagggg

SEQ ID NO: 24357 - DNA, 21 bp, Artificial Sequence
  source: /note="Description of Artificial Sequence: Synthetic oligonucleotide"
agtcatgttgtgaatagtctg

SEQ ID NO: 24358 - DNA, 21 bp, Artificial Sequence
  source: /note="Description of Artificial Sequence: Synthetic oligonucleotide"
tctcatgtttatccgggtccg

SEQ ID NO: 24359 - DNA, 21 bp, Artificial Sequence
  source: /note="Description of Artificial Sequence: Synthetic oligonucleotide"
agtattgctgcgcatcagggg

SEQ ID NO: 24360 - DNA, 21 bp, Artificial Sequence
  source: /note="Description of Artificial Sequence: Synthetic oligonucleotide"
agtattgctcaggttggtgct

SEQ ID NO: 24361 - DNA, 21 bp, Artificial Sequence
  source: /note="Description of Artificial Sequence: Synthetic oligonucleotide"
agtattgctcgtgctgtgacg

SEQ ID NO: 24362 - DNA, 21 bp, Artificial Sequence
  source: /note="Description of Artificial Sequence: Synthetic oligonucleotide"
tctattgattcgattgcggtg

SEQ ID NO: 24363 - DNA, 21 bp, Artificial Sequence
  source: /note="Description of Artificial Sequence: Synthetic oligonucleotide"
tctattgattcgtcgtctctg

SEQ ID NO: 24364 - DNA, 21 bp, Artificial Sequence
  source: /note="Description of Artificial Sequence: Synthetic oligonucleotide"
tctattgattctacttatatg

SEQ ID NO: 24365 - DNA, 21 bp, Artificial Sequence
  source: /note="Description of Artificial Sequence: Synthetic oligonucleotide"
tcgattgagcgtgagcttcgt

SEQ ID NO: 24366 - DNA, 21 bp, Artificial Sequence
  source: /note="Description of Artificial Sequence: Synthetic oligonucleotide"
agtattgggggtgttctttat

SEQ ID NO: 24367 - DNA, 21 bp, Artificial Sequence
  source: /note="Description of Artificial Sequence: Synthetic oligonucleotide"
tcgattgggaattttccggat

SEQ ID NO: 24368 - DNA, 21 bp, Artificial Sequence
  source: /note="Description of Artificial Sequence: Synthetic oligonucleotide"
tctattgggtctgcgccggct

SEQ ID NO: 24369 - DNA, 21 bp, Artificial Sequence
  source: /note="Description of Artificial Sequence: Synthetic oligonucleotide"
agtattgggactgttgtgggg

SEQ ID NO: 24370 - DNA, 21 bp, Artificial Sequence
  source: /note="Description of Artificial Sequence: Synthetic oligonucleotide"
tctattggggtgcatccgggt

SEQ ID NO: 24371 - DNA, 21 bp, Artificial Sequence
  source: /note="Description of Artificial Sequence: Synthetic oligonucleotide"
agtattcatttggttacttct

SEQ ID NO: 24372 - DNA, 21 bp, Artificial Sequence
  source: /note="Description of Artificial Sequence: Synthetic oligonucleotide"
tctattcataatggtccgcag

SEQ ID NO: 24373 - DNA, 21 bp, Artificial Sequence
  source: /note="Description of Artificial Sequence: Synthetic oligonucleotide"
tctattattgagtcggttgcg

SEQ ID NO: 24374 - DNA, 21 bp, Artificial Sequence
  source: /note="Description of Artificial Sequence: Synthetic oligonucleotide"
tctattattcaggctaagcct

SEQ ID NO: 24375 - DNA, 21 bp, Artificial Sequence
  source: /note="Description of Artificial Sequence: Synthetic oligonucleotide"
tcgattattagtgagaggagg

SEQ ID NO: 24376 - DNA, 21 bp, Artificial Sequence
  source: /note="Description of Artificial Sequence: Synthetic oligonucleotide"
agtattaaggttaatccgcct

SEQ ID NO: 24377 - DNA, 21 bp, Artificial Sequence
  source: /note="Description of Artificial Sequence: Synthetic oligonucleotide"
tctattcttggggcgattcct

SEQ ID NO: 24378 - DNA, 21 bp, Artificial Sequence
  source: /note="Description of Artificial Sequence: Synthetic oligonucleotide"
tcgattctttatggtatgccg

SEQ ID NO: 24379 - DNA, 21 bp, Artificial Sequence
  source: /note="Description of Artificial Sequence: Synthetic oligonucleotide"
tctattatgaatacggggcct

SEQ ID NO: 24380 - DNA, 21 bp, Artificial Sequence
  source: /note="Description of Artificial Sequence: Synthetic oligonucleotide"
tctattatgcgtacggattgt

SEQ ID NO: 24381 - DNA, 21 bp, Artificial Sequence
  source: /note="Description of Artificial Sequence: Synthetic oligonucleotide"
tctattaatgaggagcctcct

SEQ ID NO: 24382 - DNA, 21 bp, Artificial Sequence
  source: /note="Description of Artificial Sequence: Synthetic oligonucleotide"
tcgattaatgtgacgcatggt

SEQ ID NO: 24383 - DNA, 21 bp, Artificial Sequence
  source: /note="Description of Artificial Sequence: Synthetic oligonucleotide"
agtattcctatgtctgggcgt

SEQ ID NO: 24384 - DNA, 21 bp, Artificial Sequence
  source: /note="Description of Artificial Sequence: Synthetic oligonucleotide"
agtattccgaatttgcaggcg

SEQ ID NO: 24385 - DNA, 21 bp, Artificial Sequence
  source: /note="Description of Artificial Sequence: Synthetic oligonucleotide"
tctattcctaatttgtatgat

SEQ ID NO: 24386 - DNA, 21 bp, Artificial Sequence
  source: /note="Description of Artificial Sequence: Synthetic oligonucleotide"
agtattccgaattcgcgtcag

SEQ ID NO: 24387 - DNA, 21 bp, Artificial Sequence
  source: /note="Description of Artificial Sequence: Synthetic oligonucleotide"
tcgattcagaagcatttgcct

SEQ ID NO: 24388 - DNA, 21 bp, Artificial Sequence
  source: /note="Description of Artificial Sequence: Synthetic oligonucleotide"
tctattcagtggaaggatagt

SEQ ID NO: 24389 - DNA, 21 bp, Artificial Sequence
  source: /note="Description of Artificial Sequence: Synthetic oligonucleotide"
tcgattagtttgccttatcct

SEQ ID NO: 24390 - DNA, 21 bp, Artificial Sequence
  source: /note="Description of Artificial Sequence: Synthetic oligonucleotide"
tctatttctccttcgccgggt

SEQ ID NO: 24391 - DNA, 21 bp, Artificial Sequence
  source: /note="Description of Artificial Sequence: Synthetic oligonucleotide"
tctatttctagtcaggatctt

SEQ ID NO: 24392 - DNA, 21 bp, Artificial Sequence
  source: /note="Description of Artificial Sequence: Synthetic oligonucleotide"
tcgattagttcgagttctggt

SEQ ID NO: 24393 - DNA, 21 bp, Artificial Sequence
  source: /note="Description of Artificial Sequence: Synthetic oligonucleotide"
tcgatttctgttatgaagcag

SEQ ID NO: 24394 - DNA, 21 bp, Artificial Sequence
  source: /note="Description of Artificial Sequence: Synthetic oligonucleotide"
tctattactccgtttaatgag

SEQ ID NO: 24395 - DNA, 21 bp, Artificial Sequence
  source: /note="Description of Artificial Sequence: Synthetic oligonucleotide"
agtattacgagtgagaagatt

SEQ ID NO: 24396 - DNA, 21 bp, Artificial Sequence
  source: /note="Description of Artificial Sequence: Synthetic oligonucleotide"
tcgattacgacgggtcggggg

SEQ ID NO: 24397 - DNA, 21 bp, Artificial Sequence
  source: /note="Description of Artificial Sequence: Synthetic oligonucleotide"
tctattacgactcgtactgat

SEQ ID NO: 24398 - DNA, 21 bp, Artificial Sequence
  source: /note="Description of Artificial Sequence: Synthetic oligonucleotide"
tcgattgttcatccggattct

SEQ ID NO: 24399 - DNA, 21 bp, Artificial Sequence
  source: /note="Description of Artificial Sequence: Synthetic oligonucleotide"
tcgattgttctgaaggggtct

SEQ ID NO: 24400 - DNA, 21 bp, Artificial Sequence
  source: /note="Description of Artificial Sequence: Synthetic oligonucleotide"
tcgattgtttctcgggtggag

SEQ ID NO: 24401 - DNA, 21 bp, Artificial Sequence
  source: /note="Description of Artificial Sequence: Synthetic oligonucleotide"
tcgattgttactgttagtggt

SEQ ID NO: 24402 - DNA, 21 bp, Artificial Sequence
  source: /note="Description of Artificial Sequence: Synthetic oligonucleotide"
tcgaaggctcatgagaatcct

SEQ ID NO: 24403 - DNA, 21 bp, Artificial Sequence
  source: /note="Description of Artificial Sequence: Synthetic oligonucleotide"
tctaaggcgccgtattctgcg

SEQ ID NO: 24404 - DNA, 21 bp, Artificial Sequence
  source: /note="Description of Artificial Sequence: Synthetic oligonucleotide"
tcgaaggcgtctttgaatcct

SEQ ID NO: 24405 - DNA, 21 bp, Artificial Sequence
  source: /note="Description of Artificial Sequence: Synthetic oligonucleotide"
agtaaggcttatactccgttg

SEQ ID NO: 24406 - DNA, 21 bp, Artificial Sequence
  source: /note="Description of Artificial Sequence: Synthetic oligonucleotide"
agtaaggatggttcgcttaat

SEQ ID NO: 24407 - DNA, 21 bp, Artificial Sequence
  source: /note="Description of Artificial Sequence: Synthetic oligonucleotide"
tctaaggatcattttccggct

SEQ ID NO: 24408 - DNA, 21 bp, Artificial Sequence
  source: /note="Description of Artificial Sequence: Synthetic oligonucleotide"
agtaaggatattctgcggtct

SEQ ID NO: 24409 - DNA, 21 bp, Artificial Sequence
  source: /note="Description of Artificial Sequence: Synthetic oligonucleotide"
tcgaaggatatgttggagact

SEQ ID NO: 24410 - DNA, 21 bp, Artificial Sequence
  source: /note="Description of Artificial Sequence: Synthetic oligonucleotide"
tctaaggatacgttgcgtaat

SEQ ID NO: 24411 - DNA, 21 bp, Artificial Sequence
  source: /note="Description of Artificial Sequence: Synthetic oligonucleotide"
tctaaggatactccgctggct

SEQ ID NO: 24412 - DNA, 21 bp, Artificial Sequence
  source: /note="Description of Artificial Sequence: Synthetic oligonucleotide"
tcgaaggagatttatacgcag

SEQ ID NO: 24413 - DNA, 21 bp, Artificial Sequence
  source: /note="Description of Artificial Sequence: Synthetic oligonucleotide"
agtaaggagaattatcctcat

SEQ ID NO: 24414 - DNA, 21 bp, Artificial Sequence
  source: /note="Description of Artificial Sequence: Synthetic oligonucleotide"
tcgaaggagaggtttccgtat

SEQ ID NO: 24415 - DNA, 21 bp, Artificial Sequence
  source: /note="Description of Artificial Sequence: Synthetic oligonucleotide"
tcgaaggagtatcctgagtat

SEQ ID NO: 24416 - DNA, 21 bp, Artificial Sequence
  source: /note="Description of Artificial Sequence: Synthetic oligonucleotide"
tcgaagtttaatgggcatctt

SEQ ID NO: 24417 - DNA, 21 bp, Artificial Sequence
  source: /note="Description of Artificial Sequence: Synthetic oligonucleotide"
tcgaagcatgaggtgtatctt

SEQ ID NO: 24418 - DNA, 21 bp, Artificial Sequence
  source: /note="Description of Artificial Sequence: Synthetic oligonucleotide"
tctaagcatacggcgtttgtt

SEQ ID NO: 24419 - DNA, 21 bp, Artificial Sequence
  source: /note="Description of Artificial Sequence: Synthetic oligonucleotide"
tctaagattgatctttatacg

SEQ ID NO: 24420 - DNA, 21 bp, Artificial Sequence
  source: /note="Description of Artificial Sequence: Synthetic oligonucleotide"
agtaagattgatcgggatgat

SEQ ID NO: 24421 - DNA, 21 bp, Artificial Sequence
  source: /note="Description of Artificial Sequence: Synthetic oligonucleotide"
agtaagattcctcatgaggtg

SEQ ID NO: 24422 - DNA, 21 bp, Artificial Sequence
  source: /note="Description of Artificial Sequence: Synthetic oligonucleotide"
tcgaagctggatgatgggcgg

SEQ ID NO: 24423 - DNA, 21 bp, Artificial Sequence
  source: /note="Description of Artificial Sequence: Synthetic oligonucleotide"
agtaagttgggttcgcatctg

SEQ ID NO: 24424 - DNA, 21 bp, Artificial Sequence
  source: /note="Description of Artificial Sequence: Synthetic oligonucleotide"
agtaagcttcctccgcttcat

SEQ ID NO: 24425 - DNA, 21 bp, Artificial Sequence
  source: /note="Description of Artificial Sequence: Synthetic oligonucleotide"
tctaagttgccggttgcgctt

SEQ ID NO: 24426 - DNA, 21 bp, Artificial Sequence
  source: /note="Description of Artificial Sequence: Synthetic oligonucleotide"
tctaagcttactactgagcct

SEQ ID NO: 24427 - DNA, 21 bp, Artificial Sequence
  source: /note="Description of Artificial Sequence: Synthetic oligonucleotide"
tcgaagatgctggagtttgtg

SEQ ID NO: 24428 - DNA, 21 bp, Artificial Sequence
  source: /note="Description of Artificial Sequence: Synthetic oligonucleotide"
tcgaagatgagtaggcttgag

SEQ ID NO: 24429 - DNA, 21 bp, Artificial Sequence
  source: /note="Description of Artificial Sequence: Synthetic oligonucleotide"
tcgaagaataatcctagtttg

SEQ ID NO: 24430 - DNA, 21 bp, Artificial Sequence
  source: /note="Description of Artificial Sequence: Synthetic oligonucleotide"
tcgaagaattctcaggattat

SEQ ID NO: 24431 - DNA, 21 bp, Artificial Sequence
  source: /note="Description of Artificial Sequence: Synthetic oligonucleotide"
agtaagaattctgtgcttaat

SEQ ID NO: 24432 - DNA, 21 bp, Artificial Sequence
  source: /note="Description of Artificial Sequence: Synthetic oligonucleotide"
tcgaagaatgtttgtgagcct

SEQ ID NO: 24433 - DNA, 21 bp, Artificial Sequence
  source: /note="Description of Artificial Sequence: Synthetic oligonucleotide"
tctaagccgcatcgggaggtt

SEQ ID NO: 24434 - DNA, 21 bp, Artificial Sequence
  source: /note="Description of Artificial Sequence: Synthetic oligonucleotide"
agtaagcctctttctggtttt

SEQ ID NO: 24435 - DNA, 21 bp, Artificial Sequence
  source: /note="Description of Artificial Sequence: Synthetic oligonucleotide"
tcgaagccttcgggtccttct

SEQ ID NO: 24436 - DNA, 21 bp, Artificial Sequence
  source: /note="Description of Artificial Sequence: Synthetic oligonucleotide"
agtaagcctacgcctactcat

SEQ ID NO: 24437 - DNA, 21 bp, Artificial Sequence
  source: /note="Description of Artificial Sequence: Synthetic oligonucleotide"
tctaagcaggctgcgtctgtg

SEQ ID NO: 24438 - DNA, 21 bp, Artificial Sequence
  source: /note="Description of Artificial Sequence: Synthetic oligonucleotide"
agtaagcagatgccgatgcat

SEQ ID NO: 24439 - DNA, 21 bp, Artificial Sequence
  source: /note="Description of Artificial Sequence: Synthetic oligonucleotide"
tcgaagcggacgacttgggat

SEQ ID NO: 24440 - DNA, 21 bp, Artificial Sequence
  source: /note="Description of Artificial Sequence: Synthetic oligonucleotide"
tctaagtcgggtacttcggag

SEQ ID NO: 24441 - DNA, 21 bp, Artificial Sequence
  source: /note="Description of Artificial Sequence: Synthetic oligonucleotide"
tctaagtctcttaagctgtct

SEQ ID NO: 24442 - DNA, 21 bp, Artificial Sequence
  source: /note="Description of Artificial Sequence: Synthetic oligonucleotide"
tcgaagagtcctaatccgtat

SEQ ID NO: 24443 - DNA, 21 bp, Artificial Sequence
  source: /note="Description of Artificial Sequence: Synthetic oligonucleotide"
tcgaagtcgcagtttcttgct

SEQ ID NO: 24444 - DNA, 21 bp, Artificial Sequence
  source: /note="Description of Artificial Sequence: Synthetic oligonucleotide"
tctaagagttcgatgcttatt

SEQ ID NO: 24445 - DNA, 21 bp, Artificial Sequence
  source: /note="Description of Artificial Sequence: Synthetic oligonucleotide"
tctaagactgatcgtatgaat

SEQ ID NO: 24446 - DNA, 21 bp, Artificial Sequence
  source: /note="Description of Artificial Sequence: Synthetic oligonucleotide"
tcgaagactagtgataggacg

SEQ ID NO: 24447 - DNA, 21 bp, Artificial Sequence
  source: /note="Description of Artificial Sequence: Synthetic oligonucleotide"
tctaagacggtggagcagaat

SEQ ID NO: 24448 - DNA, 21 bp, Artificial Sequence
  source: /note="Description of Artificial Sequence: Synthetic oligonucleotide"
agtaaggtgcctagtcttgct

SEQ ID NO: 24449 - DNA, 21 bp, Artificial Sequence
  source: /note="Description of Artificial Sequence: Synthetic oligonucleotide"
tctaaggtgcgtgagcctatt

SEQ ID NO: 24450 - DNA, 21 bp, Artificial Sequence
  source: /note="Description of Artificial Sequence: Synthetic oligonucleotide"
tcgaagtatgcgactgttgtg

SEQ ID NO: 24451 - DNA, 21 bp, Artificial Sequence
  source: /note="Description of Artificial Sequence: Synthetic oligonucleotide"
tcgaagtatttgcgtatggat

SEQ ID NO: 24452 - DNA, 21 bp, Artificial Sequence
  source: /note="Description of Artificial Sequence: Synthetic oligonucleotide"
agtaagtatactctggcttat

SEQ ID NO: 24453 - DNA, 21 bp, Artificial Sequence
  source: /note="Description of Artificial Sequence: Synthetic oligonucleotide"
tctcttgctgatgctaatgct

SEQ ID NO: 24454 - DNA, 21 bp, Artificial Sequence
  source: /note="Description of Artificial Sequence: Synthetic oligonucleotide"
agtctggctggtaatagttct

SEQ ID NO: 24455 - DNA, 21 bp, Artificial Sequence
  source: /note="Description of Artificial Sequence: Synthetic oligonucleotide"
tctttggctaagatgccgggt

SEQ ID NO: 24456 - DNA, 21 bp, Artificial Sequence
  source: /note="Description of Artificial Sequence: Synthetic oligonucleotide"
agtttggctcttgttgggcgg

SEQ ID NO: 24457 - DNA, 21 bp, Artificial Sequence
  source: /note="Description of Artificial Sequence: Synthetic oligonucleotide"
tctttggcgccgactgttatg

SEQ ID NO: 24458 - DNA, 21 bp, Artificial Sequence
  source: /note="Description of Artificial Sequence: Synthetic oligonucleotide"
tctcttgctcagaagcagcct

SEQ ID NO: 24459 - DNA, 21 bp, Artificial Sequence
  source: /note="Description of Artificial Sequence: Synthetic oligonucleotide"
tcgctggcgcagcttcattct

SEQ ID NO: 24460 - DNA, 21 bp, Artificial Sequence
  source: /note="Description of Artificial Sequence: Synthetic oligonucleotide"
tctctggcttcttctgcgatg

SEQ ID NO: 24461 - DNA, 21 bp, Artificial Sequence
  source: /note="Description of Artificial Sequence: Synthetic oligonucleotide"
tcgttggcgtcgactgggttt

SEQ ID NO: 24462 - DNA, 21 bp, Artificial Sequence
  source: /note="Description of Artificial Sequence: Synthetic oligonucleotide"
agtcttgcgactcggatttct

SEQ ID NO: 24463 - DNA, 21 bp, Artificial Sequence
  source: /note="Description of Artificial Sequence: Synthetic oligonucleotide"
agtcttgctactagtccgtat

SEQ ID NO: 24464 - DNA, 21 bp, Artificial Sequence
  source: /note="Description of Artificial Sequence: Synthetic oligonucleotide"
agtttggatgcgacgaaggat

SEQ ID NO: 24465 - DNA, 21 bp, Artificial Sequence
  source: /note="Description of Artificial Sequence: Synthetic oligonucleotide"
tcgcttgattttccgcggcct

SEQ ID NO: 24466 - DNA, 21 bp, Artificial Sequence
  source: /note="Description of Artificial Sequence: Synthetic oligonucleotide"
tcgcttgatcatcataatcgt

SEQ ID NO: 24467 - DNA, 21 bp, Artificial Sequence
  source: /note="Description of Artificial Sequence: Synthetic oligonucleotide"
tcgcttgataaggcgctgcgt

SEQ ID NO: 24468 - DNA, 21 bp, Artificial Sequence
  source: /note="Description of Artificial Sequence: Synthetic oligonucleotide"
tctctggatatgcagaagcag

SEQ ID NO: 24469 - DNA, 21 bp, Artificial Sequence
  source: /note="Description of Artificial Sequence: Synthetic oligonucleotide"
tcgctggatcctaagaatagt

SEQ ID NO: 24470 - DNA, 21 bp, Artificial Sequence
  source: /note="Description of Artificial Sequence: Synthetic oligonucleotide"
tctttggagattccgaagatt

SEQ ID NO: 24471 - DNA, 21 bp, Artificial Sequence
  source: /note="Description of Artificial Sequence: Synthetic oligonucleotide"
agtctggagaagcgtggtgag

SEQ ID NO: 24472 - DNA, 21 bp, Artificial Sequence
  source: /note="Description of Artificial Sequence: Synthetic oligonucleotide"
tctttggagcgtcatgtttat

SEQ ID NO: 24473 - DNA, 21 bp, Artificial Sequence
  source: /note="Description of Artificial Sequence: Synthetic oligonucleotide"
tcgcttgagtctgagcatcgt

SEQ ID NO: 24474 - DNA, 21 bp, Artificial Sequence
  source: /note="Description of Artificial Sequence: Synthetic oligonucleotide"
tctctggagagtatgattcat

SEQ ID NO: 24475 - DNA, 21 bp, Artificial Sequence
  source: /note="Description of Artificial Sequence: Synthetic oligonucleotide"
tcgcttgagagtcgtcattat

SEQ ID NO: 24476 - DNA, 21 bp, Artificial Sequence
  source: /note="Description of Artificial Sequence: Synthetic oligonucleotide"
agtctggaggtggttcgtaag

SEQ ID NO: 24477 - DNA, 21 bp, Artificial Sequence
  source: /note="Description of Artificial Sequence: Synthetic oligonucleotide"
tcgctttttaaggatgtgtct

SEQ ID NO: 24478 - DNA, 21 bp, Artificial Sequence
  source: /note="Description of Artificial Sequence: Synthetic oligonucleotide"
tcgttgtttcctgcggggggt

SEQ ID NO: 24479 - DNA, 21 bp, Artificial Sequence
  source: /note="Description of Artificial Sequence: Synthetic oligonucleotide"
agtctgtttagtgcgcgtccg

SEQ ID NO: 24480 - DNA, 21 bp, Artificial Sequence
  source: /note="Description of Artificial Sequence: Synthetic oligonucleotide"
agtttggggtttcgggcgggg

SEQ ID NO: 24481 - DNA, 21 bp, Artificial Sequence
  source: /note="Description of Artificial Sequence: Synthetic oligonucleotide"
tcgctggggatttcgaatttt

SEQ ID NO: 24482 - DNA, 21 bp, Artificial Sequence
  source: /note="Description of Artificial Sequence: Synthetic oligonucleotide"
tcgcttggtaagacttcgcct

SEQ ID NO: 24483 - DNA, 21 bp, Artificial Sequence
  source: /note="Description of Artificial Sequence: Synthetic oligonucleotide"
agtctggggatgaagtctgct

SEQ ID NO: 24484 - DNA, 21 bp, Artificial Sequence
  source: /note="Description of Artificial Sequence: Synthetic oligonucleotide"
tctcttggtcagagtcagtat

SEQ ID NO: 24485 - DNA, 21 bp, Artificial Sequence
  source: /note="Description of Artificial Sequence: Synthetic oligonucleotide"
tcgcttgggcggggttcgatt

SEQ ID NO: 24486 - DNA, 21 bp, Artificial Sequence
  source: /note="Description of Artificial Sequence: Synthetic oligonucleotide"
tcgttgggtactggtgttggg

SEQ ID NO: 24487 - DNA, 21 bp, Artificial Sequence
  source: /note="Description of Artificial Sequence: Synthetic oligonucleotide"
tcgctgcatgcgattaagaat

SEQ ID NO: 24488 - DNA, 21 bp, Artificial Sequence
  source: /note="Description of Artificial Sequence: Synthetic oligonucleotide"
tctcttcatgcggttgtgtcg

SEQ ID NO: 24489 - DNA, 21 bp, Artificial Sequence
  source: /note="Description of Artificial Sequence: Synthetic oligonucleotide"
agtcttcatgatatgtctggg

SEQ ID NO: 24490 - DNA, 21 bp, Artificial Sequence
  source: /note="Description of Artificial Sequence: Synthetic oligonucleotide"
tcgctgcattcgagtgatagt

SEQ ID NO: 24491 - DNA, 21 bp, Artificial Sequence
  source: /note="Description of Artificial Sequence: Synthetic oligonucleotide"
tctctgattgatccgtatgag

SEQ ID NO: 24492 - DNA, 21 bp, Artificial Sequence
  source: /note="Description of Artificial Sequence: Synthetic oligonucleotide"
tcgcttattgatcgtcatcct

SEQ ID NO: 24493 - DNA, 21 bp, Artificial Sequence
  source: /note="Description of Artificial Sequence: Synthetic oligonucleotide"
tcgctgattgggggtcagcag

SEQ ID NO: 24494 - DNA, 21 bp, Artificial Sequence
  source: /note="Description of Artificial Sequence: Synthetic oligonucleotide"
tcgttgattcggtcgagtacg

SEQ ID NO: 24495 - DNA, 21 bp, Artificial Sequence
  source: /note="Description of Artificial Sequence: Synthetic oligonucleotide"
tctctgattagtgagaagggt

SEQ ID NO: 24496 - DNA, 21 bp, Artificial Sequence
  source: /note="Description of Artificial Sequence: Synthetic oligonucleotide"
agtttgaaggcgtctcctccg

SEQ ID NO: 24497 - DNA, 21 bp, Artificial Sequence
  source: /note="Description of Artificial Sequence: Synthetic oligonucleotide"
tcgcttaaggaggcgtggttg

SEQ ID NO: 24498 - DNA, 21 bp, Artificial Sequence
  source: /note="Description of Artificial Sequence: Synthetic oligonucleotide"
tcgctgaagattcctacggcg

SEQ ID NO: 24499 - DNA, 21 bp, Artificial Sequence
  source: /note="Description of Artificial Sequence: Synthetic oligonucleotide"
tcgcttaagaatgagctggct

SEQ ID NO: 24500 - DNA, 21 bp, Artificial Sequence
  source: /note="Description of Artificial Sequence: Synthetic oligonucleotide"
tctcttaagcctggtggtggg

SEQ ID NO: 24501 - DNA, 21 bp, Artificial Sequence
  source: /note="Description of Artificial Sequence: Synthetic oligonucleotide"
agtctgaagccttatcagagt

SEQ ID NO: 24502 - DNA, 21 bp, Artificial Sequence
  source: /note="Description of Artificial Sequence: Synthetic oligonucleotide"
tctttgaagcagtcgcatcct

SEQ ID NO: 24503 - DNA, 21 bp, Artificial Sequence
  source: /note="Description of Artificial Sequence: Synthetic oligonucleotide"
tctttgaagtctccgcagctt

SEQ ID NO: 24504 - DNA, 21 bp, Artificial Sequence
  source: /note="Description of Artificial Sequence: Synthetic oligonucleotide"
tcgctgaagacttatcctgag

SEQ ID NO: 24505 - DNA, 21 bp, Artificial Sequence
  source: /note="Description of Artificial Sequence: Synthetic oligonucleotide"
agtcttttggcgaaggttccg

SEQ ID NO: 24506 - DNA, 21 bp, Artificial Sequence
  source: /note="Description of Artificial Sequence: Synthetic oligonucleotide"
tcgttgttggataggcctatt

SEQ ID NO: 24507 - DNA, 21 bp, Artificial Sequence
  source: /note="Description of Artificial Sequence: Synthetic oligonucleotide"
tcgctgttggggccgactcag

SEQ ID NO: 24508 - DNA, 21 bp, Artificial Sequence
  source: /note="Description of Artificial Sequence: Synthetic oligonucleotide"
tctcttttgaagcctgttcag

SEQ ID NO: 24509 - DNA, 21 bp, Artificial Sequence
  source: /note="Description of Artificial Sequence: Synthetic oligonucleotide"
tctctgcttcttctttgtgct

SEQ ID NO: 24510 - DNA, 21 bp, Artificial Sequence
  source: /note="Description of Artificial Sequence: Synthetic oligonucleotide"
agtctgcttttgaatcggggt

SEQ ID NO: 24511 - DNA, 21 bp, Artificial Sequence
  source: /note="Description of Artificial Sequence: Synthetic oligonucleotide"
agtttgcttctgcagaatcct

SEQ ID NO: 24512 - DNA, 21 bp, Artificial Sequence
  source: /note="Description of Artificial Sequence: Synthetic oligonucleotide"
agtctgctgaattctgatact

SEQ ID NO: 24513 - DNA, 21 bp, Artificial Sequence
  source: /note="Description of Artificial Sequence: Synthetic oligonucleotide"
agtcttttgaggcaggtgcct

SEQ ID NO: 24514 - DNA, 21 bp, Artificial Sequence
  source: /note="Description of Artificial Sequence: Synthetic oligonucleotide"
agtcttctttcggtgtcgcat

SEQ ID NO: 24515 - DNA, 21 bp, Artificial Sequence
  source: /note="Description of Artificial Sequence: Synthetic oligonucleotide"
agtttgcttactgctagtgtt

SEQ ID NO: 24516 - DNA, 21 bp, Artificial Sequence
  source: /note="Description of Artificial Sequence: Synthetic oligonucleotide"
tcgcttctgactagtgctccg

SEQ ID NO: 24517 - DNA, 21 bp, Artificial Sequence
  source: /note="Description of Artificial Sequence: Synthetic oligonucleotide"
agtctgcttgtgaatctttct

SEQ ID NO: 24518 - DNA, 21 bp, Artificial Sequence
  source: /note="Description of Artificial Sequence: Synthetic oligonucleotide"
tctttgctgtatccgactcct

SEQ ID NO: 24519 - DNA, 21 bp, Artificial Sequence
  source: /note="Description of Artificial Sequence: Synthetic oligonucleotide"
tcgttgatggcggcggggctt

SEQ ID NO: 24520 - DNA, 21 bp, Artificial Sequence
  source: /note="Description of Artificial Sequence: Synthetic oligonucleotide"
tctctgatggcgagtattggt

SEQ ID NO: 24521 - DNA, 21 bp, Artificial Sequence
  source: /note="Description of Artificial Sequence: Synthetic oligonucleotide"
tctcttatgcatgatgtgtct

SEQ ID NO: 24522 - DNA, 21 bp, Artificial Sequence
  source: /note="Description of Artificial Sequence: Synthetic oligonucleotide"
agtctgatgagtcttgatact

SEQ ID NO: 24523 - DNA, 21 bp, Artificial Sequence
  source: /note="Description of Artificial Sequence: Synthetic oligonucleotide"
tcgttgatgtcgccgtctatg

SEQ ID NO: 24524 - DNA, 21 bp, Artificial Sequence
  source: /note="Description of Artificial Sequence: Synthetic oligonucleotide"
agtcttaatctgaggggtaat

SEQ ID NO: 24525 - DNA, 21 bp, Artificial Sequence
  source: /note="Description of Artificial Sequence: Synthetic oligonucleotide"
tcgttgaataatgcgcggaat

SEQ ID NO: 24526 - DNA, 21 bp, Artificial Sequence
  source: /note="Description of Artificial Sequence: Synthetic oligonucleotide"
agtctgaataatgggttgact

SEQ ID NO: 24527 - DNA, 21 bp, Artificial Sequence
  source: /note="Description of Artificial Sequence: Synthetic oligonucleotide"
agtctgaataatcggccgagt

SEQ ID NO: 24528 - DNA, 21 bp, Artificial Sequence
  source: /note="Description of Artificial Sequence: Synthetic oligonucleotide"
agtttgaatcctaagtctcct

SEQ ID NO: 24529 - DNA, 21 bp, Artificial Sequence
  source: /note="Description of Artificial Sequence: Synthetic oligonucleotide"
tctttgaatccttctgggatg

SEQ ID NO: 24530 - DNA, 21 bp, Artificial Sequence
  source: /note="Description of Artificial Sequence: Synthetic oligonucleotide"
tcgctgaataggcagggtaat

SEQ ID NO: 24531 - DNA, 21 bp, Artificial Sequence
  source: /note="Description of Artificial Sequence: Synthetic oligonucleotide"
tctctgaattcttattcgccg

SEQ ID NO: 24532 - DNA, 21 bp, Artificial Sequence
  source: /note="Description of Artificial Sequence: Synthetic oligonucleotide"
tctctgaatactggtactatt

SEQ ID NO: 24533 - DNA, 21 bp, Artificial Sequence
  source: /note="Description of Artificial Sequence: Synthetic oligonucleotide"
agtctgaatactttgggtacg

SEQ ID NO: 24534 - DNA, 21 bp, Artificial Sequence
  source: /note="Description of Artificial Sequence: Synthetic oligonucleotide"
tcgttgaatacgatgaatgct

SEQ ID NO: 24535 - DNA, 21 bp, Artificial Sequence
  source: /note="Description of Artificial Sequence: Synthetic oligonucleotide"
tcgcttaatacgacgcctgag

SEQ ID NO: 24536 - DNA, 21 bp, Artificial Sequence
  source: /note="Description of Artificial Sequence: Synthetic oligonucleotide"
agtcttaatgttgctgatgct

SEQ ID NO: 24537 - DNA, 21 bp, Artificial Sequence
  source: /note="Description of Artificial Sequence: Synthetic oligonucleotide"
tctcttccggcgcagcaggtt

SEQ ID NO: 24538 - DNA, 21 bp, Artificial Sequence
  source: /note="Description of Artificial Sequence: Synthetic oligonucleotide"
tctttgcctgcgtcgactctg

SEQ ID NO: 24539 - DNA, 21 bp, Artificial Sequence
  source: /note="Description of Artificial Sequence: Synthetic oligonucleotide"
agtttgcctgagtctaatagt

SEQ ID NO: 24540 - DNA, 21 bp, Artificial Sequence
  source: /note="Description of Artificial Sequence: Synthetic oligonucleotide"
agtctgccggggtctgttatg

SEQ ID NO: 24541 - DNA, 21 bp, Artificial Sequence
  source: /note="Description of Artificial Sequence: Synthetic oligonucleotide"
tcgttgccgggtacggtgagg

SEQ ID NO: 24542 - DNA, 21 bp, Artificial Sequence
  source: /note="Description of Artificial Sequence: Synthetic oligonucleotide"
tcgcttcctcatattcgtcat

SEQ ID NO: 24543 - DNA, 21 bp, Artificial Sequence
  source: /note="Description of Artificial Sequence: Synthetic oligonucleotide"
agtttgccgcattcgtgtggt

SEQ ID NO: 24544 - DNA, 21 bp, Artificial Sequence
  source: /note="Description of Artificial Sequence: Synthetic oligonucleotide"
tctctgcctattgggggttct

SEQ ID NO: 24545 - DNA, 21 bp, Artificial Sequence
  source: /note="Description of Artificial Sequence: Synthetic oligonucleotide"
tcgctgccgaagccgtctcat

SEQ ID NO: 24546 - DNA, 21 bp, Artificial Sequence
  source: /note="Description of Artificial Sequence: Synthetic oligonucleotide"
tctttgccgcttaaggttaat

SEQ ID NO: 24547 - DNA, 21 bp, Artificial Sequence
  source: /note="Description of Artificial Sequence: Synthetic oligonucleotide"
tctcttcctttgcgtgatttg

SEQ ID NO: 24548 - DNA, 21 bp, Artificial Sequence
  source: /note="Description of Artificial Sequence: Synthetic oligonucleotide"
tcgctgccgaatattggtact

SEQ ID NO: 24549 - DNA, 21 bp, Artificial Sequence
  source: /note="Description of Artificial Sequence: Synthetic oligonucleotide"
agtctgccgcagcctcctttg

SEQ ID NO: 24550 - DNA, 21 bp, Artificial Sequence
  source: /note="Description of Artificial Sequence: Synthetic oligonucleotide"
agtttgcctcagactttgagg

SEQ ID NO: 24551 - DNA, 21 bp, Artificial Sequence
  source: /note="Description of Artificial Sequence: Synthetic oligonucleotide"
tcgctgcctcgtggttctaat

SEQ ID NO: 24552 - DNA, 21 bp, Artificial Sequence
  source: /note="Description of Artificial Sequence: Synthetic oligonucleotide"
tctcttccgtctctgctgggt

SEQ ID NO: 24553 - DNA, 21 bp, Artificial Sequence
  source: /note="Description of Artificial Sequence: Synthetic oligonucleotide"
tctttgccttcgtctccgtct

SEQ ID NO: 24554 - DNA, 21 bp, Artificial Sequence
  source: /note="Description of Artificial Sequence: Synthetic oligonucleotide"
tctttgccgtctacgcatgtg

SEQ ID NO: 24555 - DNA, 21 bp, Artificial Sequence
  source: /note="Description of Artificial Sequence: Synthetic oligonucleotide"
tctttgccgactgggcctatt

SEQ ID NO: 24556 - DNA, 21 bp, Artificial Sequence
  source: /note="Description of Artificial Sequence: Synthetic oligonucleotide"
agtctgccgacgtctactatg

SEQ ID NO: 24557 - DNA, 21 bp, Artificial Sequence
  source: /note="Description of Artificial Sequence: Synthetic oligonucleotide"
agtctgcctgttccgagtagg

SEQ ID NO: 24558 - DNA, 21 bp, Artificial Sequence
  source: /note="Description of Artificial Sequence: Synthetic oligonucleotide"
tcgcttcctgtgcggggggtg

SEQ ID NO: 24559 - DNA, 21 bp, Artificial Sequence
  source: /note="Description of Artificial Sequence: Synthetic oligonucleotide"
tctcttcctgtgtctccgtct

SEQ ID NO: 24560 - DNA, 21 bp, Artificial Sequence
  source: /note="Description of Artificial Sequence: Synthetic oligonucleotide"
tctctgcctgttactggtcgt

SEQ ID NO: 24561 - DNA, 21 bp, Artificial Sequence
  source: /note="Description of Artificial Sequence: Synthetic oligonucleotide"
tcgttgcagtttacgtcgtcg

SEQ ID NO: 24562 - DNA, 21 bp, Artificial Sequence
  source: /note="Description of Artificial Sequence: Synthetic oligonucleotide"
tctcttcagagggatctggtt

SEQ ID NO: 24563 - DNA, 21 bp, Artificial Sequence
  source: /note="Description of Artificial Sequence: Synthetic oligonucleotide"
tctctgcagcggccgactatt

SEQ ID NO: 24564 - DNA, 21 bp, Artificial Sequence
  source: /note="Description of Artificial Sequence: Synthetic oligonucleotide"
tctttgcagtcgtctcggggt

SEQ ID NO: 24565 - DNA, 21 bp, Artificial Sequence
  source: /note="Description of Artificial Sequence: Synthetic oligonucleotide"
tcgcttcagactgataatgag

SEQ ID NO: 24566 - DNA, 21 bp, Artificial Sequence
  source: /note="Description of Artificial Sequence: Synthetic oligonucleotide"
tctcttcagacgagtcgtgtg

SEQ ID NO: 24567 - DNA, 21 bp, Artificial Sequence
  source: /note="Description of Artificial Sequence: Synthetic oligonucleotide"
tctcttcagtggactagtgcg

SEQ ID NO: 24568 - DNA, 21 bp, Artificial Sequence
  source: /note="Description of Artificial Sequence: Synthetic oligonucleotide"
tctctgcgtgcgaatacttat

SEQ ID NO: 24569 - DNA, 21 bp, Artificial Sequence
  source: /note="Description of Artificial Sequence: Synthetic oligonucleotide"
tcgctgcgggctgttgtgcct

SEQ ID NO: 24570 - DNA, 21 bp, Artificial Sequence
  source: /note="Description of Artificial Sequence: Synthetic oligonucleotide"
agtctgcgggattcttatcat

SEQ ID NO: 24571 - DNA, 21 bp, Artificial Sequence
  source: /note="Description of Artificial Sequence: Synthetic oligonucleotide"
tctcttcgggaggatgctcag

SEQ ID NO: 24572 - DNA, 21 bp, Artificial Sequence
  source: /note="Description of Artificial Sequence: Synthetic oligonucleotide"
tctttgcggggttctagtagt

SEQ ID NO: 24573 - DNA, 21 bp, Artificial Sequence
  source: /note="Description of Artificial Sequence: Synthetic oligonucleotide"
tctttgcgtcatagtgagacg

SEQ ID NO: 24574 - DNA, 21 bp, Artificial Sequence
  source: /note="Description of Artificial Sequence: Synthetic oligonucleotide"
agtttgcgtatttctgctacg

SEQ ID NO: 24575 - DNA, 21 bp, Artificial Sequence
  source: /note="Description of Artificial Sequence: Synthetic oligonucleotide"
tcgcttcgtcctgatcagcat

SEQ ID NO: 24576 - DNA, 21 bp, Artificial Sequence
  source: /note="Description of Artificial Sequence: Synthetic oligonucleotide"
tcgttgaggccgaattcttct

SEQ ID NO: 24577 - DNA, 21 bp, Artificial Sequence
  source: /note="Description of Artificial Sequence: Synthetic oligonucleotide"
tcgcttaggtcgctgaattcg

SEQ ID NO: 24578 - DNA, 21 bp, Artificial Sequence
  source: /note="Description of Artificial Sequence: Synthetic oligonucleotide"
tctttgcgtactggtgattat

SEQ ID NO: 24579 - DNA, 21 bp, Artificial Sequence
  source: /note="Description of Artificial Sequence: Synthetic oligonucleotide"
tctcttcggacgattgctgcg

SEQ ID NO: 24580 - DNA, 21 bp, Artificial Sequence
  source: /note="Description of Artificial Sequence: Synthetic oligonucleotide"
tctttgaggactaatgtggtg

SEQ ID NO: 24581 - DNA, 21 bp, Artificial Sequence
  source: /note="Description of Artificial Sequence: Synthetic oligonucleotide"
tctctgcgtacgtcgatggtg

SEQ ID NO: 24582 - DNA, 21 bp, Artificial Sequence
  source: /note="Description of Artificial Sequence: Synthetic oligonucleotide"
tcgcttcgtgtggcggagctg

SEQ ID NO: 24583 - DNA, 21 bp, Artificial Sequence
  source: /note="Description of Artificial Sequence: Synthetic oligonucleotide"
tcgctgcgggttccggttgct

SEQ ID NO: 24584 - DNA, 21 bp, Artificial Sequence
  source: /note="Description of Artificial Sequence: Synthetic oligonucleotide"
tcgttgtcggctcatgatagg

SEQ ID NO: 24585 - DNA, 21 bp, Artificial Sequence
  source: /note="Description of Artificial Sequence: Synthetic oligonucleotide"
agtctttctgagacgtttagg

SEQ ID NO: 24586 - DNA, 21 bp, Artificial Sequence
  source: /note="Description of Artificial Sequence: Synthetic oligonucleotide"
agtctgagtggtgctcgggct

SEQ ID NO: 24587 - DNA, 21 bp, Artificial Sequence
  source: /note="Description of Artificial Sequence: Synthetic oligonucleotide"
agtctttctggtaatactgat

SEQ ID NO: 24588 - DNA, 21 bp, Artificial Sequence
  source: /note="Description of Artificial Sequence: Synthetic oligonucleotide"
tcgttgtcgggtcggccgagt

SEQ ID NO: 24589 - DNA, 21 bp, Artificial Sequence
  source: /note="Description of Artificial Sequence: Synthetic oligonucleotide"
tcgttgtcgcattttccggct

SEQ ID NO: 24590 - DNA, 21 bp, Artificial Sequence
  source: /note="Description of Artificial Sequence: Synthetic oligonucleotide"
tctttgtctcattcggatggg

SEQ ID NO: 24591 - DNA, 21 bp, Artificial Sequence
  source: /note="Description of Artificial Sequence: Synthetic oligonucleotide"
tctctttctattgataaggct

SEQ ID NO: 24592 - DNA, 21 bp, Artificial Sequence
  source: /note="Description of Artificial Sequence: Synthetic oligonucleotide"
tctctttcgaagatgcctagt

SEQ ID NO: 24593 - DNA, 21 bp, Artificial Sequence
  source: /note="Description of Artificial Sequence: Synthetic oligonucleotide"
agtctgtctaagccggttggt

SEQ ID NO: 24594 - DNA, 21 bp, Artificial Sequence
  source: /note="Description of Artificial Sequence: Synthetic oligonucleotide"
tctttgtcgccgcgtactttt

SEQ ID NO: 24595 - DNA, 21 bp, Artificial Sequence
  source: /note="Description of Artificial Sequence: Synthetic oligonucleotide"
tctctttcgcagggttctaat

SEQ ID NO: 24596 - DNA, 21 bp, Artificial Sequence
  source: /note="Description of Artificial Sequence: Synthetic oligonucleotide"
tctctttctcgggctgggcct

SEQ ID NO: 24597 - DNA, 21 bp, Artificial Sequence
  source: /note="Description of Artificial Sequence: Synthetic oligonucleotide"
tcgctttcgagtgctattggg

SEQ ID NO: 24598 - DNA, 21 bp, Artificial Sequence
  source: /note="Description of Artificial Sequence: Synthetic oligonucleotide"
tcgctttcgtctcggaatatt

SEQ ID NO: 24599 - DNA, 21 bp, Artificial Sequence
  source: /note="Description of Artificial Sequence: Synthetic oligonucleotide"
agtttgtcgacgacgtctaag

SEQ ID NO: 24600 - DNA, 21 bp, Artificial Sequence
  source: /note="Description of Artificial Sequence: Synthetic oligonucleotide"
tcgttgagtgttgagcctact

SEQ ID NO: 24601 - DNA, 21 bp, Artificial Sequence
  source: /note="Description of Artificial Sequence: Synthetic oligonucleotide"
tcgctgtcttatgcgaatcat

SEQ ID NO: 24602 - DNA, 21 bp, Artificial Sequence
  source: /note="Description of Artificial Sequence: Synthetic oligonucleotide"
tctttgtcgtatgcgcaggag

SEQ ID NO: 24603 - DNA, 21 bp, Artificial Sequence
  source: /note="Description of Artificial Sequence: Synthetic oligonucleotide"
tcgcttacggctggggggcat

SEQ ID NO: 24604 - DNA, 21 bp, Artificial Sequence
  source: /note="Description of Artificial Sequence: Synthetic oligonucleotide"
tcgttgacgtttagtactggg

SEQ ID NO: 24605 - DNA, 21 bp, Artificial Sequence
  source: /note="Description of Artificial Sequence: Synthetic oligonucleotide"
tcgcttacgggtgatggtgtt

SEQ ID NO: 24606 - DNA, 21 bp, Artificial Sequence
  source: /note="Description of Artificial Sequence: Synthetic oligonucleotide"
tctcttactcatattaatcat

SEQ ID NO: 24607 - DNA, 21 bp, Artificial Sequence
  source: /note="Description of Artificial Sequence: Synthetic oligonucleotide"
tctttgacgcatattccgatg

SEQ ID NO: 24608 - DNA, 21 bp, Artificial Sequence
  source: /note="Description of Artificial Sequence: Synthetic oligonucleotide"
tcgcttacgattgctgcggtt

SEQ ID NO: 24609 - DNA, 21 bp, Artificial Sequence
  source: /note="Description of Artificial Sequence: Synthetic oligonucleotide"
tctcttacgaatgaggctaag

SEQ ID NO: 24610 - DNA, 21 bp, Artificial Sequence
  source: /note="Description of Artificial Sequence: Synthetic oligonucleotide"
agtcttacgaatattgctcag

SEQ ID NO: 24611 - DNA, 21 bp, Artificial Sequence
  source: /note="Description of Artificial Sequence: Synthetic oligonucleotide"
tcgctgactcctattatgcgg

SEQ ID NO: 24612 - DNA, 21 bp, Artificial Sequence
  source: /note="Description of Artificial Sequence: Synthetic oligonucleotide"
agtctgacgcctcgttctact

SEQ ID NO: 24613 - DNA, 21 bp, Artificial Sequence
  source: /note="Description of Artificial Sequence: Synthetic oligonucleotide"
tctttgactccgtcgtttgct

SEQ ID NO: 24614 - DNA, 21 bp, Artificial Sequence
  source: /note="Description of Artificial Sequence: Synthetic oligonucleotide"
agtttgactagtgctactact

SEQ ID NO: 24615 - DNA, 21 bp, Artificial Sequence
  source: /note="Description of Artificial Sequence: Synthetic oligonucleotide"
agtcttacttctcggccgatg

SEQ ID NO: 24616 - DNA, 21 bp, Artificial Sequence
  source: /note="Description of Artificial Sequence: Synthetic oligonucleotide"
tctttgacttctacgatgagt

SEQ ID NO: 24617 - DNA, 21 bp, Artificial Sequence
  source: /note="Description of Artificial Sequence: Synthetic oligonucleotide"
tcgcttactgttttgcgtaat

SEQ ID NO: 24618 - DNA, 21 bp, Artificial Sequence
  source: /note="Description of Artificial Sequence: Synthetic oligonucleotide"
tctcttacttatgataattct

SEQ ID NO: 24619 - DNA, 21 bp, Artificial Sequence
  source: /note="Description of Artificial Sequence: Synthetic oligonucleotide"
tctttgacttatgagcgtgat

SEQ ID NO: 24620 - DNA, 21 bp, Artificial Sequence
  source: /note="Description of Artificial Sequence: Synthetic oligonucleotide"
agtctgacgtatggggctttg

SEQ ID NO: 24621 - DNA, 21 bp, Artificial Sequence
  source: /note="Description of Artificial Sequence: Synthetic oligonucleotide"
tcgcttgttgagcgtacgtct

SEQ ID NO: 24622 - DNA, 21 bp, Artificial Sequence
  source: /note="Description of Artificial Sequence: Synthetic oligonucleotide"
tcgttggttgggactgttgat

SEQ ID NO: 24623 - DNA, 21 bp, Artificial Sequence
  source: /note="Description of Artificial Sequence: Synthetic oligonucleotide"
tcgcttgtgcatcgttctact

SEQ ID NO: 24624 - DNA, 21 bp, Artificial Sequence
  source: /note="Description of Artificial Sequence: Synthetic oligonucleotide"
agtttggtgaatgagacgagt

SEQ ID NO: 24625 - DNA, 21 bp, Artificial Sequence
  source: /note="Description of Artificial Sequence: Synthetic oligonucleotide"
tctcttgtgcagaagctgtct

SEQ ID NO: 24626 - DNA, 21 bp, Artificial Sequence
  source: /note="Description of Artificial Sequence: Synthetic oligonucleotide"
agtcttgttcggagtggtgat

SEQ ID NO: 24627 - DNA, 21 bp, Artificial Sequence
  source: /note="Description of Artificial Sequence: Synthetic oligonucleotide"
tcgctggtgcgttctcagaat

SEQ ID NO: 24628 - DNA, 21 bp, Artificial Sequence
  source: /note="Description of Artificial Sequence: Synthetic oligonucleotide"
agtctggtgtctcggatttct

SEQ ID NO: 24629 - DNA, 21 bp, Artificial Sequence
  source: /note="Description of Artificial Sequence: Synthetic oligonucleotide"
tctctggttacggcggggagt

SEQ ID NO: 24630 - DNA, 21 bp, Artificial Sequence
  source: /note="Description of Artificial Sequence: Synthetic oligonucleotide"
tctcttgtggttcagtcggct

SEQ ID NO: 24631 - DNA, 21 bp, Artificial Sequence
  source: /note="Description of Artificial Sequence: Synthetic oligonucleotide"
tcgcttgtttatgatcctctg

SEQ ID NO: 24632 - DNA, 21 bp, Artificial Sequence
  source: /note="Description of Artificial Sequence: Synthetic oligonucleotide"
tcgttgtatagtggtaatgtt

SEQ ID NO: 24633 - DNA, 21 bp, Artificial Sequence
  source: /note="Description of Artificial Sequence: Synthetic oligonucleotide"
tctctgtatgtgcctaagcat

SEQ ID NO: 24634 - DNA, 21 bp, Artificial Sequence
  source: /note="Description of Artificial Sequence: Synthetic oligonucleotide"
tcgctttattataaggaggag

SEQ ID NO: 24635 - DNA, 21 bp, Artificial Sequence
  source: /note="Description of Artificial Sequence: Synthetic oligonucleotide"
agtatggctgcgacgcctgcg

SEQ ID NO: 24636 - DNA, 21 bp, Artificial Sequence
  source: /note="Description of Artificial Sequence: Synthetic oligonucleotide"
tcgatggctttgagtgggatt

SEQ ID NO: 24637 - DNA, 21 bp, Artificial Sequence
  source: /note="Description of Artificial Sequence: Synthetic oligonucleotide"
tctatggctgtgtctgtgccg

SEQ ID NO: 24638 - DNA, 21 bp, Artificial Sequence
  source: /note="Description of Artificial Sequence: Synthetic oligonucleotide"
tctatggattgtctttcgcct

SEQ ID NO: 24639 - DNA, 21 bp, Artificial Sequence
  source: /note="Description of Artificial Sequence: Synthetic oligonucleotide"
tcgatggatccgggtgctcgg

SEQ ID NO: 24640 - DNA, 21 bp, Artificial Sequence
  source: /note="Description of Artificial Sequence: Synthetic oligonucleotide"
tcgatggataggaagactggt

SEQ ID NO: 24641 - DNA, 21 bp, Artificial Sequence
  source: /note="Description of Artificial Sequence: Synthetic oligonucleotide"
tcgatggatgttagtgatacg

SEQ ID NO: 24642 - DNA, 21 bp, Artificial Sequence
  source: /note="Description of Artificial Sequence: Synthetic oligonucleotide"
agtatggagtctaggcttctg

SEQ ID NO: 24643 - DNA, 21 bp, Artificial Sequence
  source: /note="Description of Artificial Sequence: Synthetic oligonucleotide"
agtatgggtgcggggccgacg

SEQ ID NO: 24644 - DNA, 21 bp, Artificial Sequence
  source: /note="Description of Artificial Sequence: Synthetic oligonucleotide"
agtatgggtgataatcggagg

SEQ ID NO: 24645 - DNA, 21 bp, Artificial Sequence
  source: /note="Description of Artificial Sequence: Synthetic oligonucleotide"
tcgatggggagtagtgctttg

SEQ ID NO: 24646 - DNA, 21 bp, Artificial Sequence
  source: /note="Description of Artificial Sequence: Synthetic oligonucleotide"
tcgatgcatgcgcttagtgtt

SEQ ID NO: 24647 - DNA, 21 bp, Artificial Sequence
  source: /note="Description of Artificial Sequence: Synthetic oligonucleotide"
tctatgcatcagactgttcat

SEQ ID NO: 24648 - DNA, 21 bp, Artificial Sequence
  source: /note="Description of Artificial Sequence: Synthetic oligonucleotide"
agtatgcatcggactagtcct

SEQ ID NO: 24649 - DNA, 21 bp, Artificial Sequence
  source: /note="Description of Artificial Sequence: Synthetic oligonucleotide"
agtatgcatacgactacgact

SEQ ID NO: 24650 - DNA, 21 bp, Artificial Sequence
  source: /note="Description of Artificial Sequence: Synthetic oligonucleotide"
tctatgcatgtgcctggtgtt

SEQ ID NO: 24651 - DNA, 21 bp, Artificial Sequence
  source: /note="Description of Artificial Sequence: Synthetic oligonucleotide"
tcgatgaaggctgttttgaat

SEQ ID NO: 24652 - DNA, 21 bp, Artificial Sequence
  source: /note="Description of Artificial Sequence: Synthetic oligonucleotide"
tcgatgcttgattctcttctg

SEQ ID NO: 24653 - DNA, 21 bp, Artificial Sequence
  source: /note="Description of Artificial Sequence: Synthetic oligonucleotide"
tctatgctgaatgttacggtt

SEQ ID NO: 24654 - DNA, 21 bp, Artificial Sequence
  source: /note="Description of Artificial Sequence: Synthetic oligonucleotide"
tctatgcttagtgctagtctg

SEQ ID NO: 24655 - DNA, 21 bp, Artificial Sequence
  source: /note="Description of Artificial Sequence: Synthetic oligonucleotide"
tctatgatggctgtgaagcct

SEQ ID NO: 24656 - DNA, 21 bp, Artificial Sequence
  source: /note="Description of Artificial Sequence: Synthetic oligonucleotide"
tctatgatggagccgtttaag

SEQ ID NO: 24657 - DNA, 21 bp, Artificial Sequence
  source: /note="Description of Artificial Sequence: Synthetic oligonucleotide"
agtatgatgaatactgttggt

SEQ ID NO: 24658 - DNA, 21 bp, Artificial Sequence
  source: /note="Description of Artificial Sequence: Synthetic oligonucleotide"
tcgatgatgcagaaggttccg

SEQ ID NO: 24659 - DNA, 21 bp, Artificial Sequence
  source: /note="Description of Artificial Sequence: Synthetic oligonucleotide"
tctatgatgacgggtttggcg

SEQ ID NO: 24660 - DNA, 21 bp, Artificial Sequence
  source: /note="Description of Artificial Sequence: Synthetic oligonucleotide"
tcgatgatgtatattgagcct

SEQ ID NO: 24661 - DNA, 21 bp, Artificial Sequence
  source: /note="Description of Artificial Sequence: Synthetic oligonucleotide"
tctatgaatcttgggtcgact

SEQ ID NO: 24662 - DNA, 21 bp, Artificial Sequence
  source: /note="Description of Artificial Sequence: Synthetic oligonucleotide"
tctatgaatccgggttcggct

SEQ ID NO: 24663 - DNA, 21 bp, Artificial Sequence
  source: /note="Description of Artificial Sequence: Synthetic oligonucleotide"
tcgatgaatccgatgactgtg

SEQ ID NO: 24664 - DNA, 21 bp, Artificial Sequence
  source: /note="Description of Artificial Sequence: Synthetic oligonucleotide"
tcgatgaatgtgtatgatact

SEQ ID NO: 24665 - DNA, 21 bp, Artificial Sequence
  source: /note="Description of Artificial Sequence: Synthetic oligonucleotide"
agtatgcctttttctgttgct

SEQ ID NO: 24666 - DNA, 21 bp, Artificial Sequence
  source: /note="Description of Artificial Sequence: Synthetic oligonucleotide"
tcgatgcctggggtggctaat

SEQ ID NO: 24667 - DNA, 21 bp, Artificial Sequence
  source: /note="Description of Artificial Sequence: Synthetic oligonucleotide"
tctatgcctcatacgctgtct

SEQ ID NO: 24668 - DNA, 21 bp, Artificial Sequence
  source: /note="Description of Artificial Sequence: Synthetic oligonucleotide"
agtatgccgatgccgagtccg

SEQ ID NO: 24669 - DNA, 21 bp, Artificial Sequence
  source: /note="Description of Artificial Sequence: Synthetic oligonucleotide"
tctatgccgaatgcgcctagt

SEQ ID NO: 24670 - DNA, 21 bp, Artificial Sequence
  source: /note="Description of Artificial Sequence: Synthetic oligonucleotide"
tcgatgcctaatccttatcag

SEQ ID NO: 24671 - DNA, 21 bp, Artificial Sequence
  source: /note="Description of Artificial Sequence: Synthetic oligonucleotide"
tctatgcctcgggatttgatt

SEQ ID NO: 24672 - DNA, 21 bp, Artificial Sequence
  source: /note="Description of Artificial Sequence: Synthetic oligonucleotide"
tcgatgccgcgggagccgggg

SEQ ID NO: 24673 - DNA, 21 bp, Artificial Sequence
  source: /note="Description of Artificial Sequence: Synthetic oligonucleotide"
tctatgccgtctccgcgggtt

SEQ ID NO: 24674 - DNA, 21 bp, Artificial Sequence
  source: /note="Description of Artificial Sequence: Synthetic oligonucleotide"
tcgatgcgggctgcggctttt

SEQ ID NO: 24675 - DNA, 21 bp, Artificial Sequence
  source: /note="Description of Artificial Sequence: Synthetic oligonucleotide"
tctatgagggatacggatcgg

SEQ ID NO: 24676 - DNA, 21 bp, Artificial Sequence
  source: /note="Description of Artificial Sequence: Synthetic oligonucleotide"
tctatgaggccgtctgataat

SEQ ID NO: 24677 - DNA, 21 bp, Artificial Sequence
  source: /note="Description of Artificial Sequence: Synthetic oligonucleotide"
tctatgaggtctggtgagcct

SEQ ID NO: 24678 - DNA, 21 bp, Artificial Sequence
  source: /note="Description of Artificial Sequence: Synthetic oligonucleotide"
tctatgcggagtcgtgatacg

SEQ ID NO: 24679 - DNA, 21 bp, Artificial Sequence
  source: /note="Description of Artificial Sequence: Synthetic oligonucleotide"
agtatgcgtagttctccgttg

SEQ ID NO: 24680 - DNA, 21 bp, Artificial Sequence
  source: /note="Description of Artificial Sequence: Synthetic oligonucleotide"
tcgatgtctggttttgatgtt

SEQ ID NO: 24681 - DNA, 21 bp, Artificial Sequence
  source: /note="Description of Artificial Sequence: Synthetic oligonucleotide"
tcgatgtcggggaggattacg

SEQ ID NO: 24682 - DNA, 21 bp, Artificial Sequence
  source: /note="Description of Artificial Sequence: Synthetic oligonucleotide"
tcgatgtctctgtctgggctt

SEQ ID NO: 24683 - DNA, 21 bp, Artificial Sequence
  source: /note="Description of Artificial Sequence: Synthetic oligonucleotide"
tctatgtcgccttctcatccg

SEQ ID NO: 24684 - DNA, 21 bp, Artificial Sequence
  source: /note="Description of Artificial Sequence: Synthetic oligonucleotide"
tctatgagtcagccgacgtat

SEQ ID NO: 24685 - DNA, 21 bp, Artificial Sequence
  source: /note="Description of Artificial Sequence: Synthetic oligonucleotide"
tcgatgtctaggccgcagcct

SEQ ID NO: 24686 - DNA, 21 bp, Artificial Sequence
  source: /note="Description of Artificial Sequence: Synthetic oligonucleotide"
agtatgtcgagttttccgccg

SEQ ID NO: 24687 - DNA, 21 bp, Artificial Sequence
  source: /note="Description of Artificial Sequence: Synthetic oligonucleotide"
agtatgagtgtggagccttat

SEQ ID NO: 24688 - DNA, 21 bp, Artificial Sequence
  source: /note="Description of Artificial Sequence: Synthetic oligonucleotide"
tcgatgactgcggatctgatt

SEQ ID NO: 24689 - DNA, 21 bp, Artificial Sequence
  source: /note="Description of Artificial Sequence: Synthetic oligonucleotide"
tctatgacggcgctgacggcg

SEQ ID NO: 24690 - DNA, 21 bp, Artificial Sequence
  source: /note="Description of Artificial Sequence: Synthetic oligonucleotide"
tcgatgactgggcctgagctt

SEQ ID NO: 24691 - DNA, 21 bp, Artificial Sequence
  source: /note="Description of Artificial Sequence: Synthetic oligonucleotide"
tctatgactttggggactgcg

SEQ ID NO: 24692 - DNA, 21 bp, Artificial Sequence
  source: /note="Description of Artificial Sequence: Synthetic oligonucleotide"
tcgatgacgcctagtgtgact

SEQ ID NO: 24693 - DNA, 21 bp, Artificial Sequence
  source: /note="Description of Artificial Sequence: Synthetic oligonucleotide"
agtatgacgacgattggtccg

SEQ ID NO: 24694 - DNA, 21 bp, Artificial Sequence
  source: /note="Description of Artificial Sequence: Synthetic oligonucleotide"
tcgatggtgcagggtcgggtg

SEQ ID NO: 24695 - DNA, 21 bp, Artificial Sequence
  source: /note="Description of Artificial Sequence: Synthetic oligonucleotide"
tcgatgtatgctgctggtagt

SEQ ID NO: 24696 - DNA, 21 bp, Artificial Sequence
  source: /note="Description of Artificial Sequence: Synthetic oligonucleotide"
tctatgtatgatccgcgtgct

SEQ ID NO: 24697 - DNA, 21 bp, Artificial Sequence
  source: /note="Description of Artificial Sequence: Synthetic oligonucleotide"
agtaatgcggcgattccgttg

SEQ ID NO: 24698 - DNA, 21 bp, Artificial Sequence
  source: /note="Description of Artificial Sequence: Synthetic oligonucleotide"
tctaatgctcttaatattggt

SEQ ID NO: 24699 - DNA, 21 bp, Artificial Sequence
  source: /note="Description of Artificial Sequence: Synthetic oligonucleotide"
tctaatgcgagggcgcctgtt

SEQ ID NO: 24700 - DNA, 21 bp, Artificial Sequence
  source: /note="Description of Artificial Sequence: Synthetic oligonucleotide"
tcgaatgctaggccgccgtcg

SEQ ID NO: 24701 - DNA, 21 bp, Artificial Sequence
  source: /note="Description of Artificial Sequence: Synthetic oligonucleotide"
tctaatgcgtctcatagtgtg

SEQ ID NO: 24702 - DNA, 21 bp, Artificial Sequence
  source: /note="Description of Artificial Sequence: Synthetic oligonucleotide"
tctaatgcgagtatgatgcat

SEQ ID NO: 24703 - DNA, 21 bp, Artificial Sequence
  source: /note="Description of Artificial Sequence: Synthetic oligonucleotide"
tcgaatgctacgacgcctacg

SEQ ID NO: 24704 - DNA, 21 bp, Artificial Sequence
  source: /note="Description of Artificial Sequence: Synthetic oligonucleotide"
tctaattgtcctaaggattgt

SEQ ID NO: 24705 - DNA, 21 bp, Artificial Sequence
  source: /note="Description of Artificial Sequence: Synthetic oligonucleotide"
agtaattgttcttcgcttaag

SEQ ID NO: 24706 - DNA, 21 bp, Artificial Sequence
  source: /note="Description of Artificial Sequence: Synthetic oligonucleotide"
tctaatgagaatcggagttcg

SEQ ID NO: 24707 - DNA, 21 bp, Artificial Sequence
  source: /note="Description of Artificial Sequence: Synthetic oligonucleotide"
tcgaatgagaggacgactaat

SEQ ID NO: 24708 - DNA, 21 bp, Artificial Sequence
  source: /note="Description of Artificial Sequence: Synthetic oligonucleotide"
agtaattttactgaggcgatg

SEQ ID NO: 24709 - DNA, 21 bp, Artificial Sequence
  source: /note="Description of Artificial Sequence: Synthetic oligonucleotide"
tctaatggtcatgatgcttct

SEQ ID NO: 24710 - DNA, 21 bp, Artificial Sequence
  source: /note="Description of Artificial Sequence: Synthetic oligonucleotide"
tctaatggtcatcctccttgg

SEQ ID NO: 24711 - DNA, 21 bp, Artificial Sequence
  source: /note="Description of Artificial Sequence: Synthetic oligonucleotide"
tctaatgggattgattctggg

SEQ ID NO: 24712 - DNA, 21 bp, Artificial Sequence
  source: /note="Description of Artificial Sequence: Synthetic oligonucleotide"
tcgaatggtctgaatcgtctt

SEQ ID NO: 24713 - DNA, 21 bp, Artificial Sequence
  source: /note="Description of Artificial Sequence: Synthetic oligonucleotide"
tctaatggtaatcgtgattcg

SEQ ID NO: 24714 - DNA, 21 bp, Artificial Sequence
  source: /note="Description of Artificial Sequence: Synthetic oligonucleotide"
tcgaatggtcagacttcgcct

SEQ ID NO: 24715 - DNA, 21 bp, Artificial Sequence
  source: /note="Description of Artificial Sequence: Synthetic oligonucleotide"
agtaatggttcgaaggttgtg

SEQ ID NO: 24716 - DNA, 21 bp, Artificial Sequence
  source: /note="Description of Artificial Sequence: Synthetic oligonucleotide"
agtaatggttctccgaaggcg

SEQ ID NO: 24717 - DNA, 21 bp, Artificial Sequence
  source: /note="Description of Artificial Sequence: Synthetic oligonucleotide"
agtaatggtagtacgtataag

SEQ ID NO: 24718 - DNA, 21 bp, Artificial Sequence
  source: /note="Description of Artificial Sequence: Synthetic oligonucleotide"
tctaatggtacgaggtcgtat

SEQ ID NO: 24719 - DNA, 21 bp, Artificial Sequence
  source: /note="Description of Artificial Sequence: Synthetic oligonucleotide"
tctaatcatgcgcatagtctt

SEQ ID NO: 24720 - DNA, 21 bp, Artificial Sequence
  source: /note="Description of Artificial Sequence: Synthetic oligonucleotide"
tcgaatcatgagattgattat

SEQ ID NO: 24721 - DNA, 21 bp, Artificial Sequence
  source: /note="Description of Artificial Sequence: Synthetic oligonucleotide"
tctaatcatggtggggtttcg

SEQ ID NO: 24722 - DNA, 21 bp, Artificial Sequence
  source: /note="Description of Artificial Sequence: Synthetic oligonucleotide"
agtaatattgggggtgggtat

SEQ ID NO: 24723 - DNA, 21 bp, Artificial Sequence
  source: /note="Description of Artificial Sequence: Synthetic oligonucleotide"
tcgaatattctgcaggcgact

SEQ ID NO: 24724 - DNA, 21 bp, Artificial Sequence
  source: /note="Description of Artificial Sequence: Synthetic oligonucleotide"
agtaataaggctgcttatgcg

SEQ ID NO: 24725 - DNA, 21 bp, Artificial Sequence
  source: /note="Description of Artificial Sequence: Synthetic oligonucleotide"
tctaataagtttgttactgcg

SEQ ID NO: 24726 - DNA, 21 bp, Artificial Sequence
  source: /note="Description of Artificial Sequence: Synthetic oligonucleotide"
agtaataagggtttgactggg

SEQ ID NO: 24727 - DNA, 21 bp, Artificial Sequence
  source: /note="Description of Artificial Sequence: Synthetic oligonucleotide"
tcgaataagggtcctgtgacg

SEQ ID NO: 24728 - DNA, 21 bp, Artificial Sequence
  source: /note="Description of Artificial Sequence: Synthetic oligonucleotide"
agtaataagtataatgaggtt

SEQ ID NO: 24729 - DNA, 21 bp, Artificial Sequence
  source: /note="Description of Artificial Sequence: Synthetic oligonucleotide"
tcgaatctggagacgtcgcgt

SEQ ID NO: 24730 - DNA, 21 bp, Artificial Sequence
  source: /note="Description of Artificial Sequence: Synthetic oligonucleotide"
tcgaatctggggtttcctgcg

SEQ ID NO: 24731 - DNA, 21 bp, Artificial Sequence
  source: /note="Description of Artificial Sequence: Synthetic oligonucleotide"
agtaatctgggtatttcggct

SEQ ID NO: 24732 - DNA, 21 bp, Artificial Sequence
  source: /note="Description of Artificial Sequence: Synthetic oligonucleotide"
tcgaatcttttgcatgcttct

SEQ ID NO: 24733 - DNA, 21 bp, Artificial Sequence
  source: /note="Description of Artificial Sequence: Synthetic oligonucleotide"
agtaatttgtctcctgagcag

SEQ ID NO: 24734 - DNA, 21 bp, Artificial Sequence
  source: /note="Description of Artificial Sequence: Synthetic oligonucleotide"
tctaatctgacgatgagtaat

SEQ ID NO: 24735 - DNA, 21 bp, Artificial Sequence
  source: /note="Description of Artificial Sequence: Synthetic oligonucleotide"
agtaatatggatacgtctaag

SEQ ID NO: 24736 - DNA, 21 bp, Artificial Sequence
  source: /note="Description of Artificial Sequence: Synthetic oligonucleotide"
tcgaatatgatgctttctgag

SEQ ID NO: 24737 - DNA, 21 bp, Artificial Sequence
  source: /note="Description of Artificial Sequence: Synthetic oligonucleotide"
agtaatatgtcggtgtcgggt

SEQ ID NO: 24738 - DNA, 21 bp, Artificial Sequence
  source: /note="Description of Artificial Sequence: Synthetic oligonucleotide"
agtaatatggttcctatgtct

SEQ ID NO: 24739 - DNA, 21 bp, Artificial Sequence
  source: /note="Description of Artificial Sequence: Synthetic oligonucleotide"
agtaataatggggagcatgtg

SEQ ID NO: 24740 - DNA, 21 bp, Artificial Sequence
  source: /note="Description of Artificial Sequence: Synthetic oligonucleotide"
agtaataatcagcgtgttgtg

SEQ ID NO: 24741 - DNA, 21 bp, Artificial Sequence
  source: /note="Description of Artificial Sequence: Synthetic oligonucleotide"
tctaatcctgcgctgagtcgt

SEQ ID NO: 24742 - DNA, 21 bp, Artificial Sequence
  source: /note="Description of Artificial Sequence: Synthetic oligonucleotide"
tcgaatcctgcttcttatgtg

SEQ ID NO: 24743 - DNA, 21 bp, Artificial Sequence
  source: /note="Description of Artificial Sequence: Synthetic oligonucleotide"
agtaatccgcttaggacgttg

SEQ ID NO: 24744 - DNA, 21 bp, Artificial Sequence
  source: /note="Description of Artificial Sequence: Synthetic oligonucleotide"
tctaatccgatgacgcttact

SEQ ID NO: 24745 - DNA, 21 bp, Artificial Sequence
  source: /note="Description of Artificial Sequence: Synthetic oligonucleotide"
tcgaatccgcctcctttgtcg

SEQ ID NO: 24746 - DNA, 21 bp, Artificial Sequence
  source: /note="Description of Artificial Sequence: Synthetic oligonucleotide"
agtaatcctcctgtgcagaag

SEQ ID NO: 24747 - DNA, 21 bp, Artificial Sequence
  source: /note="Description of Artificial Sequence: Synthetic oligonucleotide"
tcgaatccgagtgcggcgcct

SEQ ID NO: 24748 - DNA, 21 bp, Artificial Sequence
  source: /note="Description of Artificial Sequence: Synthetic oligonucleotide"
tcgaatcagcagggtatggcg

SEQ ID NO: 24749 - DNA, 21 bp, Artificial Sequence
  source: /note="Description of Artificial Sequence: Synthetic oligonucleotide"
tcgaatcagagtcctccgccg

SEQ ID NO: 24750 - DNA, 21 bp, Artificial Sequence
  source: /note="Description of Artificial Sequence: Synthetic oligonucleotide"
tcgaatagtgggcgggctccg

SEQ ID NO: 24751 - DNA, 21 bp, Artificial Sequence
  source: /note="Description of Artificial Sequence: Synthetic oligonucleotide"
tctaattcgcattctccggag

SEQ ID NO: 24752 - DNA, 21 bp, Artificial Sequence
  source: /note="Description of Artificial Sequence: Synthetic oligonucleotide"
tcgaattcgatttctgctgcg

SEQ ID NO: 24753 - DNA, 21 bp, Artificial Sequence
  source: /note="Description of Artificial Sequence: Synthetic oligonucleotide"
tctaattcgcttcctgtgatg

SEQ ID NO: 24754 - DNA, 21 bp, Artificial Sequence
  source: /note="Description of Artificial Sequence: Synthetic oligonucleotide"
tctaatagtcctcgtgggtat

SEQ ID NO: 24755 - DNA, 21 bp, Artificial Sequence
  source: /note="Description of Artificial Sequence: Synthetic oligonucleotide"
tcgaattcgcagcctaatgtg

SEQ ID NO: 24756 - DNA, 21 bp, Artificial Sequence
  source: /note="Description of Artificial Sequence: Synthetic oligonucleotide"
tcgaattcgagggtggcgggg

SEQ ID NO: 24757 - DNA, 21 bp, Artificial Sequence
  source: /note="Description of Artificial Sequence: Synthetic oligonucleotide"
agtaatagttctgctgtgcat

SEQ ID NO: 24758 - DNA, 21 bp, Artificial Sequence
  source: /note="Description of Artificial Sequence: Synthetic oligonucleotide"
tcgaattcgacgattatttat

SEQ ID NO: 24759 - DNA, 21 bp, Artificial Sequence
  source: /note="Description of Artificial Sequence: Synthetic oligonucleotide"
tctaattcttatatgatgctg

SEQ ID NO: 24760 - DNA, 21 bp, Artificial Sequence
  source: /note="Description of Artificial Sequence: Synthetic oligonucleotide"
agtaatactctgagtcagttg

SEQ ID NO: 24761 - DNA, 21 bp, Artificial Sequence
  source: /note="Description of Artificial Sequence: Synthetic oligonucleotide"
agtaatactaatctttctgag

SEQ ID NO: 24762 - DNA, 21 bp, Artificial Sequence
  source: /note="Description of Artificial Sequence: Synthetic oligonucleotide"
tcgaatactactgctgctgtg

SEQ ID NO: 24763 - DNA, 21 bp, Artificial Sequence
  source: /note="Description of Artificial Sequence: Synthetic oligonucleotide"
tcgaatgttgcgattgttcag

SEQ ID NO: 24764 - DNA, 21 bp, Artificial Sequence
  source: /note="Description of Artificial Sequence: Synthetic oligonucleotide"
agtaatgttgagattatggag

SEQ ID NO: 24765 - DNA, 21 bp, Artificial Sequence
  source: /note="Description of Artificial Sequence: Synthetic oligonucleotide"
tcgaatgtgggtactcatttt

SEQ ID NO: 24766 - DNA, 21 bp, Artificial Sequence
  source: /note="Description of Artificial Sequence: Synthetic oligonucleotide"
tcgaatgtgcattctctgcat

SEQ ID NO: 24767 - DNA, 21 bp, Artificial Sequence
  source: /note="Description of Artificial Sequence: Synthetic oligonucleotide"
agtaatgttaatggtgctgat

SEQ ID NO: 24768 - DNA, 21 bp, Artificial Sequence
  source: /note="Description of Artificial Sequence: Synthetic oligonucleotide"
tctaatgttagggaggttgcg

SEQ ID NO: 24769 - DNA, 21 bp, Artificial Sequence
  source: /note="Description of Artificial Sequence: Synthetic oligonucleotide"
tcgaatgttagtccgcggcct

SEQ ID NO: 24770 - DNA, 21 bp, Artificial Sequence
  source: /note="Description of Artificial Sequence: Synthetic oligonucleotide"
tcgaatgtggtggtgctgcat

SEQ ID NO: 24771 - DNA, 21 bp, Artificial Sequence
  source: /note="Description of Artificial Sequence: Synthetic oligonucleotide"
tcgaattattcgctgaatcat

SEQ ID NO: 24772 - DNA, 21 bp, Artificial Sequence
  source: /note="Description of Artificial Sequence: Synthetic oligonucleotide"
tctccggcggctgagattaag

SEQ ID NO: 24773 - DNA, 21 bp, Artificial Sequence
  source: /note="Description of Artificial Sequence: Synthetic oligonucleotide"
agtcctgctctgaatcggagt

SEQ ID NO: 24774 - DNA, 21 bp, Artificial Sequence
  source: /note="Description of Artificial Sequence: Synthetic oligonucleotide"
tctccggcgaatcagtatgat

SEQ ID NO: 24775 - DNA, 21 bp, Artificial Sequence
  source: /note="Description of Artificial Sequence: Synthetic oligonucleotide"
agtccggcgccgtatgctctt

SEQ ID NO: 24776 - DNA, 21 bp, Artificial Sequence
  source: /note="Description of Artificial Sequence: Synthetic oligonucleotide"
tctcctgctcagtctgatgat

SEQ ID NO: 24777 - DNA, 21 bp, Artificial Sequence
  source: /note="Description of Artificial Sequence: Synthetic oligonucleotide"
tcgcctgcgcgggctgggtat

SEQ ID NO: 24778 - DNA, 21 bp, Artificial Sequence
  source: /note="Description of Artificial Sequence: Synthetic oligonucleotide"
agtccggcgcggaatttgatt

SEQ ID NO: 24779 - DNA, 21 bp, Artificial Sequence
  source: /note="Description of Artificial Sequence: Synthetic oligonucleotide"
tctcctgcgtctcatcatcgt

SEQ ID NO: 24780 - DNA, 21 bp, Artificial Sequence
  source: /note="Description of Artificial Sequence: Synthetic oligonucleotide"
tctccggctgtggggtgtcat

SEQ ID NO: 24781 - DNA, 21 bp, Artificial Sequence
  source: /note="Description of Artificial Sequence: Synthetic oligonucleotide"
tctccgtgtcctggtgatgcg

SEQ ID NO: 24782 - DNA, 21 bp, Artificial Sequence
  source: /note="Description of Artificial Sequence: Synthetic oligonucleotide"
agtccggatttgcctggtttg

SEQ ID NO: 24783 - DNA, 21 bp, Artificial Sequence
  source: /note="Description of Artificial Sequence: Synthetic oligonucleotide"
tctcctgatcttaggacgcct

SEQ ID NO: 24784 - DNA, 21 bp, Artificial Sequence
  source: /note="Description of Artificial Sequence: Synthetic oligonucleotide"
tctcctgatcgtgcgcagctg

SEQ ID NO: 24785 - DNA, 21 bp, Artificial Sequence
  source: /note="Description of Artificial Sequence: Synthetic oligonucleotide"
tcgcctgattcgaatgggccg

SEQ ID NO: 24786 - DNA, 21 bp, Artificial Sequence
  source: /note="Description of Artificial Sequence: Synthetic oligonucleotide"
agtccggatgttgttgtgagt

SEQ ID NO: 24787 - DNA, 21 bp, Artificial Sequence
  source: /note="Description of Artificial Sequence: Synthetic oligonucleotide"
tcgcctgagtttggtacgggt

SEQ ID NO: 24788 - DNA, 21 bp, Artificial Sequence
  source: /note="Description of Artificial Sequence: Synthetic oligonucleotide"
agtcctgagcttcctaaggcg

SEQ ID NO: 24789 - DNA, 21 bp, Artificial Sequence
  source: /note="Description of Artificial Sequence: Synthetic oligonucleotide"
tctcctgagtctcgtatgccg

SEQ ID NO: 24790 - DNA, 21 bp, Artificial Sequence
  source: /note="Description of Artificial Sequence: Synthetic oligonucleotide"
agtccttttgatgcgaatgtg

SEQ ID NO: 24791 - DNA, 21 bp, Artificial Sequence
  source: /note="Description of Artificial Sequence: Synthetic oligonucleotide"
tctccttttccgccgcagctg

SEQ ID NO: 24792 - DNA, 21 bp, Artificial Sequence
  source: /note="Description of Artificial Sequence: Synthetic oligonucleotide"
tctccttttagggatcaggag

SEQ ID NO: 24793 - DNA, 21 bp, Artificial Sequence
  source: /note="Description of Artificial Sequence: Synthetic oligonucleotide"
tcgccttttacgatgcgtcct

SEQ ID NO: 24794 - DNA, 21 bp, Artificial Sequence
  source: /note="Description of Artificial Sequence: Synthetic oligonucleotide"
tcgcctggggatccggcggag

SEQ ID NO: 24795 - DNA, 21 bp, Artificial Sequence
  source: /note="Description of Artificial Sequence: Synthetic oligonucleotide"
tcgccggggggtcatgttagt

SEQ ID NO: 24796 - DNA, 21 bp, Artificial Sequence
  source: /note="Description of Artificial Sequence: Synthetic oligonucleotide"
agtccgggtcatcctccgagt

SEQ ID NO: 24797 - DNA, 21 bp, Artificial Sequence
  source: /note="Description of Artificial Sequence: Synthetic oligonucleotide"
agtcctggtattcgtgatttt

SEQ ID NO: 24798 - DNA, 21 bp, Artificial Sequence
  source: /note="Description of Artificial Sequence: Synthetic oligonucleotide"
tctccgggtatttctaggctg

SEQ ID NO: 24799 - DNA, 21 bp, Artificial Sequence
  source: /note="Description of Artificial Sequence: Synthetic oligonucleotide"
tcgccgggtccgcataagtcg

SEQ ID NO: 24800 - DNA, 21 bp, Artificial Sequence
  source: /note="Description of Artificial Sequence: Synthetic oligonucleotide"
tctcctgggtctggtaagtct

SEQ ID NO: 24801 - DNA, 21 bp, Artificial Sequence
  source: /note="Description of Artificial Sequence: Synthetic oligonucleotide"
tcgcctggttcgccgatgtct

SEQ ID NO: 24802 - DNA, 21 bp, Artificial Sequence
  source: /note="Description of Artificial Sequence: Synthetic oligonucleotide"
tcgccggggactttgccgact

SEQ ID NO: 24803 - DNA, 21 bp, Artificial Sequence
  source: /note="Description of Artificial Sequence: Synthetic oligonucleotide"
agtcctggtgttatgccgggg

SEQ ID NO: 24804 - DNA, 21 bp, Artificial Sequence
  source: /note="Description of Artificial Sequence: Synthetic oligonucleotide"
agtcctcatgatgagacttcg

SEQ ID NO: 24805 - DNA, 21 bp, Artificial Sequence
  source: /note="Description of Artificial Sequence: Synthetic oligonucleotide"
agtcctcatgatagtccgctg

SEQ ID NO: 24806 - DNA, 21 bp, Artificial Sequence
  source: /note="Description of Artificial Sequence: Synthetic oligonucleotide"
tcgccgcatattactcatatg

SEQ ID NO: 24807 - DNA, 21 bp, Artificial Sequence
  source: /note="Description of Artificial Sequence: Synthetic oligonucleotide"
agtccgcataagaatgcgcat

SEQ ID NO: 24808 - DNA, 21 bp, Artificial Sequence
  source: /note="Description of Artificial Sequence: Synthetic oligonucleotide"
tcgcctcatttgcggggtgcg

SEQ ID NO: 24809 - DNA, 21 bp, Artificial Sequence
  source: /note="Description of Artificial Sequence: Synthetic oligonucleotide"
tctccgcatcctgagaatcat

SEQ ID NO: 24810 - DNA, 21 bp, Artificial Sequence
  source: /note="Description of Artificial Sequence: Synthetic oligonucleotide"
tctccgattgagcggcggacg

SEQ ID NO: 24811 - DNA, 21 bp, Artificial Sequence
  source: /note="Description of Artificial Sequence: Synthetic oligonucleotide"
tcgccgattcagacgaattct

SEQ ID NO: 24812 - DNA, 21 bp, Artificial Sequence
  source: /note="Description of Artificial Sequence: Synthetic oligonucleotide"
tctccgattcagactcagggt

SEQ ID NO: 24813 - DNA, 21 bp, Artificial Sequence
  source: /note="Description of Artificial Sequence: Synthetic oligonucleotide"
tcgccgatttctattaagaat

SEQ ID NO: 24814 - DNA, 21 bp, Artificial Sequence
  source: /note="Description of Artificial Sequence: Synthetic oligonucleotide"
tctcctattacgcctggtcgg

SEQ ID NO: 24815 - DNA, 21 bp, Artificial Sequence
  source: /note="Description of Artificial Sequence: Synthetic oligonucleotide"
tcgccgattacgtataatacg

SEQ ID NO: 24816 - DNA, 21 bp, Artificial Sequence
  source: /note="Description of Artificial Sequence: Synthetic oligonucleotide"
agtccgaagattccgacgcat

SEQ ID NO: 24817 - DNA, 21 bp, Artificial Sequence
  source: /note="Description of Artificial Sequence: Synthetic oligonucleotide"
tcgcctaagattccttggact

SEQ ID NO: 24818 - DNA, 21 bp, Artificial Sequence
  source: /note="Description of Artificial Sequence: Synthetic oligonucleotide"
tctcctaagatgctgaggtcg

SEQ ID NO: 24819 - DNA, 21 bp, Artificial Sequence
  source: /note="Description of Artificial Sequence: Synthetic oligonucleotide"
tcgccgaaggttgcgggtgtg

SEQ ID NO: 24820 - DNA, 21 bp, Artificial Sequence
  source: /note="Description of Artificial Sequence: Synthetic oligonucleotide"
tcgccgctggcggaggctcgt

SEQ ID NO: 24821 - DNA, 21 bp, Artificial Sequence
  source: /note="Description of Artificial Sequence: Synthetic oligonucleotide"
agtccgctggctactcgggtt

SEQ ID NO: 24822 - DNA, 21 bp, Artificial Sequence
  source: /note="Description of Artificial Sequence: Synthetic oligonucleotide"
agtcctcttattgtgaatact

SEQ ID NO: 24823 - DNA, 21 bp, Artificial Sequence
  source: /note="Description of Artificial Sequence: Synthetic oligonucleotide"
tctccgttgcttttggcgagt

SEQ ID NO: 24824 - DNA, 21 bp, Artificial Sequence
  source: /note="Description of Artificial Sequence: Synthetic oligonucleotide"
agtcctcttccgccttctaat

SEQ ID NO: 24825 - DNA, 21 bp, Artificial Sequence
  source: /note="Description of Artificial Sequence: Synthetic oligonucleotide"
tcgcctcttcgtgagcgtgtt

SEQ ID NO: 24826 - DNA, 21 bp, Artificial Sequence
  source: /note="Description of Artificial Sequence: Synthetic oligonucleotide"
tcgccgttgcgttctgatgtg

SEQ ID NO: 24827 - DNA, 21 bp, Artificial Sequence
  source: /note="Description of Artificial Sequence: Synthetic oligonucleotide"
agtccgctgacggatctttct

SEQ ID NO: 24828 - DNA, 21 bp, Artificial Sequence
  source: /note="Description of Artificial Sequence: Synthetic oligonucleotide"
agtcctcttactgattcgtat

SEQ ID NO: 24829 - DNA, 21 bp, Artificial Sequence
  source: /note="Description of Artificial Sequence: Synthetic oligonucleotide"
tcgcctctgacgacggtgcct

SEQ ID NO: 24830 - DNA, 21 bp, Artificial Sequence
  source: /note="Description of Artificial Sequence: Synthetic oligonucleotide"
tctccgttggtttcgactgct

SEQ ID NO: 24831 - DNA, 21 bp, Artificial Sequence
  source: /note="Description of Artificial Sequence: Synthetic oligonucleotide"
agtccgatgaaggcgggtacg

SEQ ID NO: 24832 - DNA, 21 bp, Artificial Sequence
  source: /note="Description of Artificial Sequence: Synthetic oligonucleotide"
tcgcctatgcggattgagcct

SEQ ID NO: 24833 - DNA, 21 bp, Artificial Sequence
  source: /note="Description of Artificial Sequence: Synthetic oligonucleotide"
tcgcctatgcgtccgcaggag

SEQ ID NO: 24834 - DNA, 21 bp, Artificial Sequence
  source: /note="Description of Artificial Sequence: Synthetic oligonucleotide"
tctccgaatgctcttctggat

SEQ ID NO: 24835 - DNA, 21 bp, Artificial Sequence
  source: /note="Description of Artificial Sequence: Synthetic oligonucleotide"
agtccgaatgctactactgat

SEQ ID NO: 24836 - DNA, 21 bp, Artificial Sequence
  source: /note="Description of Artificial Sequence: Synthetic oligonucleotide"
agtccgaatatggatcggctt

SEQ ID NO: 24837 - DNA, 21 bp, Artificial Sequence
  source: /note="Description of Artificial Sequence: Synthetic oligonucleotide"
tcgcctaatatgggtcagttt

SEQ ID NO: 24838 - DNA, 21 bp, Artificial Sequence
  source: /note="Description of Artificial Sequence: Synthetic oligonucleotide"
agtccgaatcgggagtctatg

SEQ ID NO: 24839 - DNA, 21 bp, Artificial Sequence
  source: /note="Description of Artificial Sequence: Synthetic oligonucleotide"
tctccgaatacgccgacgttt

SEQ ID NO: 24840 - DNA, 21 bp, Artificial Sequence
  source: /note="Description of Artificial Sequence: Synthetic oligonucleotide"
agtcctaatactaggactgct

SEQ ID NO: 24841 - DNA, 21 bp, Artificial Sequence
  source: /note="Description of Artificial Sequence: Synthetic oligonucleotide"
tctcctccgaattttcctgag

SEQ ID NO: 24842 - DNA, 21 bp, Artificial Sequence
  source: /note="Description of Artificial Sequence: Synthetic oligonucleotide"
tcgcctcctcaggctaatgct

SEQ ID NO: 24843 - DNA, 21 bp, Artificial Sequence
  source: /note="Description of Artificial Sequence: Synthetic oligonucleotide"
agtccgcctcaggtgactaag

SEQ ID NO: 24844 - DNA, 21 bp, Artificial Sequence
  source: /note="Description of Artificial Sequence: Synthetic oligonucleotide"
tctcctccgaggaatatggag

SEQ ID NO: 24845 - DNA, 21 bp, Artificial Sequence
  source: /note="Description of Artificial Sequence: Synthetic oligonucleotide"
agtccgccgcgtgtggggttg

SEQ ID NO: 24846 - DNA, 21 bp, Artificial Sequence
  source: /note="Description of Artificial Sequence: Synthetic oligonucleotide"
agtccgcctactgctcgtgat

SEQ ID NO: 24847 - DNA, 21 bp, Artificial Sequence
  source: /note="Description of Artificial Sequence: Synthetic oligonucleotide"
agtccgccggtgtcgtttgag

SEQ ID NO: 24848 - DNA, 21 bp, Artificial Sequence
  source: /note="Description of Artificial Sequence: Synthetic oligonucleotide"
agtccgcagggtaatggtgcg

SEQ ID NO: 24849 - DNA, 21 bp, Artificial Sequence
  source: /note="Description of Artificial Sequence: Synthetic oligonucleotide"
tctcctcagggtacttatgtg

SEQ ID NO: 24850 - DNA, 21 bp, Artificial Sequence
  source: /note="Description of Artificial Sequence: Synthetic oligonucleotide"
agtccgcagattacgcgtccg

SEQ ID NO: 24851 - DNA, 21 bp, Artificial Sequence
  source: /note="Description of Artificial Sequence: Synthetic oligonucleotide"
tcgcctcagaggattgaggat

SEQ ID NO: 24852 - DNA, 21 bp, Artificial Sequence
  source: /note="Description of Artificial Sequence: Synthetic oligonucleotide"
tctccgcagcgtccgatgaat

SEQ ID NO: 24853 - DNA, 21 bp, Artificial Sequence
  source: /note="Description of Artificial Sequence: Synthetic oligonucleotide"
tctccgagggctcgtattgat

SEQ ID NO: 24854 - DNA, 21 bp, Artificial Sequence
  source: /note="Description of Artificial Sequence: Synthetic oligonucleotide"
agtcctcgggatcctgagatt

SEQ ID NO: 24855 - DNA, 21 bp, Artificial Sequence
  source: /note="Description of Artificial Sequence: Synthetic oligonucleotide"
tcgcctcgtgagtgtggtctg

SEQ ID NO: 24856 - DNA, 21 bp, Artificial Sequence
  source: /note="Description of Artificial Sequence: Synthetic oligonucleotide"
tcgccgaggggtatggggttg

SEQ ID NO: 24857 - DNA, 21 bp, Artificial Sequence
  source: /note="Description of Artificial Sequence: Synthetic oligonucleotide"
tcgccgcgtggtatgccgctt

SEQ ID NO: 24858 - DNA, 21 bp, Artificial Sequence
  source: /note="Description of Artificial Sequence: Synthetic oligonucleotide"
tcgccgaggcataatcttggt

SEQ ID NO: 24859 - DNA, 21 bp, Artificial Sequence
  source: /note="Description of Artificial Sequence: Synthetic oligonucleotide"
tctcctcgtattagggatgat

SEQ ID NO: 24860 - DNA, 21 bp, Artificial Sequence
  source: /note="Description of Artificial Sequence: Synthetic oligonucleotide"
agtccgcgtccgtcgtatgct

SEQ ID NO: 24861 - DNA, 21 bp, Artificial Sequence
  source: /note="Description of Artificial Sequence: Synthetic oligonucleotide"
tctccgcggcagttgtctgtt

SEQ ID NO: 24862 - DNA, 21 bp, Artificial Sequence
  source: /note="Description of Artificial Sequence: Synthetic oligonucleotide"
tctccgcggcagaatattccg

SEQ ID NO: 24863 - DNA, 21 bp, Artificial Sequence
  source: /note="Description of Artificial Sequence: Synthetic oligonucleotide"
tctcctcggcagagtatttcg

SEQ ID NO: 24864 - DNA, 21 bp, Artificial Sequence
  source: /note="Description of Artificial Sequence: Synthetic oligonucleotide"
tcgcctcggactgcgcttcct

SEQ ID NO: 24865 - DNA, 21 bp, Artificial Sequence
  source: /note="Description of Artificial Sequence: Synthetic oligonucleotide"
tctcctaggacgggtttgggt

SEQ ID NO: 24866 - DNA, 21 bp, Artificial Sequence
  source: /note="Description of Artificial Sequence: Synthetic oligonucleotide"
tctcctcgttggcatgaggat

SEQ ID NO: 24867 - DNA, 21 bp, Artificial Sequence
  source: /note="Description of Artificial Sequence: Synthetic oligonucleotide"
agtccgtctgctcttttgcat

SEQ ID NO: 24868 - DNA, 21 bp, Artificial Sequence
  source: /note="Description of Artificial Sequence: Synthetic oligonucleotide"
tctccgtcggcgatggggatt

SEQ ID NO: 24869 - DNA, 21 bp, Artificial Sequence
  source: /note="Description of Artificial Sequence: Synthetic oligonucleotide"
agtccttcggggaataatggg

SEQ ID NO: 24870 - DNA, 21 bp, Artificial Sequence
  source: /note="Description of Artificial Sequence: Synthetic oligonucleotide"
agtccttcgggtccggtgagg

SEQ ID NO: 24871 - DNA, 21 bp, Artificial Sequence
  source: /note="Description of Artificial Sequence: Synthetic oligonucleotide"
tcgccttcgggttcgttggcg

SEQ ID NO: 24872 - DNA, 21 bp, Artificial Sequence
  source: /note="Description of Artificial Sequence: Synthetic oligonucleotide"
tcgcctagtggggtggcgggg

SEQ ID NO: 24873 - DNA, 21 bp, Artificial Sequence
  source: /note="Description of Artificial Sequence: Synthetic oligonucleotide"
tctccttctctgtcgcggtcg

SEQ ID NO: 24874 - DNA, 21 bp, Artificial Sequence
  source: /note="Description of Artificial Sequence: Synthetic oligonucleotide"
tcgccttcgctgacggctggg

SEQ ID NO: 24875 - DNA, 21 bp, Artificial Sequence
  source: /note="Description of Artificial Sequence: Synthetic oligonucleotide"
agtccgtcgcttacgagtgat

SEQ ID NO: 24876 - DNA, 21 bp, Artificial Sequence
  source: /note="Description of Artificial Sequence: Synthetic oligonucleotide"
tctcctagtatgcctgctcgt

SEQ ID NO: 24877 - DNA, 21 bp, Artificial Sequence
  source: /note="Description of Artificial Sequence: Synthetic oligonucleotide"
tctccgagtaggcatgagatt

SEQ ID NO: 24878 - DNA, 21 bp, Artificial Sequence
  source: /note="Description of Artificial Sequence: Synthetic oligonucleotide"
tcgccgagtcggatgaatagt

SEQ ID NO: 24879 - DNA, 21 bp, Artificial Sequence
  source: /note="Description of Artificial Sequence: Synthetic oligonucleotide"
tctccttctaggcctagtacg

SEQ ID NO: 24880 - DNA, 21 bp, Artificial Sequence
  source: /note="Description of Artificial Sequence: Synthetic oligonucleotide"
agtccgtctaggacgtctttg

SEQ ID NO: 24881 - DNA, 21 bp, Artificial Sequence
  source: /note="Description of Artificial Sequence: Synthetic oligonucleotide"
agtccgagtagtcttaaggag

SEQ ID NO: 24882 - DNA, 21 bp, Artificial Sequence
  source: /note="Description of Artificial Sequence: Synthetic oligonucleotide"
tctccgtctacgggtaagttg

SEQ ID NO: 24883 - DNA, 21 bp, Artificial Sequence
  source: /note="Description of Artificial Sequence: Synthetic oligonucleotide"
tctccgtctactcttccgcct

SEQ ID NO: 24884 - DNA, 21 bp, Artificial Sequence
  source: /note="Description of Artificial Sequence: Synthetic oligonucleotide"
agtccgagtactaataatacg

SEQ ID NO: 24885 - DNA, 21 bp, Artificial Sequence
  source: /note="Description of Artificial Sequence: Synthetic oligonucleotide"
agtccgtcgactcggatgggg

SEQ ID NO: 24886 - DNA, 21 bp, Artificial Sequence
  source: /note="Description of Artificial Sequence: Synthetic oligonucleotide"
tctccgagtgttgcgtatcat

SEQ ID NO: 24887 - DNA, 21 bp, Artificial Sequence
  source: /note="Description of Artificial Sequence: Synthetic oligonucleotide"
tcgccgagtgttgagttgttt

SEQ ID NO: 24888 - DNA, 21 bp, Artificial Sequence
  source: /note="Description of Artificial Sequence: Synthetic oligonucleotide"
tcgccgacggctaagatgtgg

SEQ ID NO: 24889 - DNA, 21 bp, Artificial Sequence
  source: /note="Description of Artificial Sequence: Synthetic oligonucleotide"
agtcctacttgtgtggcgtgt

SEQ ID NO: 24890 - DNA, 21 bp, Artificial Sequence
  source: /note="Description of Artificial Sequence: Synthetic oligonucleotide"
tctcctacggattttatgaat

SEQ ID NO: 24891 - DNA, 21 bp, Artificial Sequence
  source: /note="Description of Artificial Sequence: Synthetic oligonucleotide"
agtccgacgtttgttgggact

SEQ ID NO: 24892 - DNA, 21 bp, Artificial Sequence
  source: /note="Description of Artificial Sequence: Synthetic oligonucleotide"
tctcctactggtgtgcagccg

SEQ ID NO: 24893 - DNA, 21 bp, Artificial Sequence
  source: /note="Description of Artificial Sequence: Synthetic oligonucleotide"
tcgcctacgattactgctcgg

SEQ ID NO: 24894 - DNA, 21 bp, Artificial Sequence
  source: /note="Description of Artificial Sequence: Synthetic oligonucleotide"
tctccgacgctttcgccgggg

SEQ ID NO: 24895 - DNA, 21 bp, Artificial Sequence
  source: /note="Description of Artificial Sequence: Synthetic oligonucleotide"
tcgcctactcggaatattgtt

SEQ ID NO: 24896 - DNA, 21 bp, Artificial Sequence
  source: /note="Description of Artificial Sequence: Synthetic oligonucleotide"
tcgcctacttcttctgtgact

SEQ ID NO: 24897 - DNA, 21 bp, Artificial Sequence
  source: /note="Description of Artificial Sequence: Synthetic oligonucleotide"
agtcctactacgcagaggact

SEQ ID NO: 24898 - DNA, 21 bp, Artificial Sequence
  source: /note="Description of Artificial Sequence: Synthetic oligonucleotide"
tctccgactgttaatcctatt

SEQ ID NO: 24899 - DNA, 21 bp, Artificial Sequence
  source: /note="Description of Artificial Sequence: Synthetic oligonucleotide"
tcgccgacggttgttctggcg

SEQ ID NO: 24900 - DNA, 21 bp, Artificial Sequence
  source: /note="Description of Artificial Sequence: Synthetic oligonucleotide"
tcgccgacttatactattgat

SEQ ID NO: 24901 - DNA, 21 bp, Artificial Sequence
  source: /note="Description of Artificial Sequence: Synthetic oligonucleotide"
agtcctgttgctaggaataat

SEQ ID NO: 24902 - DNA, 21 bp, Artificial Sequence
  source: /note="Description of Artificial Sequence: Synthetic oligonucleotide"
tcgcctgttggtgggaaggat

SEQ ID NO: 24903 - DNA, 21 bp, Artificial Sequence
  source: /note="Description of Artificial Sequence: Synthetic oligonucleotide"
tcgccggttggttcgtctggt

SEQ ID NO: 24904 - DNA, 21 bp, Artificial Sequence
  source: /note="Description of Artificial Sequence: Synthetic oligonucleotide"
tctcctgtgatgcttcagtct

SEQ ID NO: 24905 - DNA, 21 bp, Artificial Sequence
  source: /note="Description of Artificial Sequence: Synthetic oligonucleotide"
agtcctgttcgtcatccgtct

SEQ ID NO: 24906 - DNA, 21 bp, Artificial Sequence
  source: /note="Description of Artificial Sequence: Synthetic oligonucleotide"
tctcctgttagtgataatcct

SEQ ID NO: 24907 - DNA, 21 bp, Artificial Sequence
  source: /note="Description of Artificial Sequence: Synthetic oligonucleotide"
tcgcctgtggtggcgcagccg

SEQ ID NO: 24908 - DNA, 21 bp, Artificial Sequence
  source: /note="Description of Artificial Sequence: Synthetic oligonucleotide"
tcgcctgtggttccgcgtgct

SEQ ID NO: 24909 - DNA, 21 bp, Artificial Sequence
  source: /note="Description of Artificial Sequence: Synthetic oligonucleotide"
agtccgtatggtcatcagaat

SEQ ID NO: 24910 - DNA, 21 bp, Artificial Sequence
  source: /note="Description of Artificial Sequence: Synthetic oligonucleotide"
tctccttataagcagaattct

SEQ ID NO: 24911 - DNA, 21 bp, Artificial Sequence
  source: /note="Description of Artificial Sequence: Synthetic oligonucleotide"
tcgccgtataatattacttcg

SEQ ID NO: 24912 - DNA, 21 bp, Artificial Sequence
  source: /note="Description of Artificial Sequence: Synthetic oligonucleotide"
tcgccttatcctgcgcttctt

SEQ ID NO: 24913 - DNA, 21 bp, Artificial Sequence
  source: /note="Description of Artificial Sequence: Synthetic oligonucleotide"
tctcaggctggtgcgattcct

SEQ ID NO: 24914 - DNA, 21 bp, Artificial Sequence
  source: /note="Description of Artificial Sequence: Synthetic oligonucleotide"
tctcaggcgatgcagacgttg

SEQ ID NO: 24915 - DNA, 21 bp, Artificial Sequence
  source: /note="Description of Artificial Sequence: Synthetic oligonucleotide"
agtcaggctcctagggatcct

SEQ ID NO: 24916 - DNA, 21 bp, Artificial Sequence
  source: /note="Description of Artificial Sequence: Synthetic oligonucleotide"
agtcaggcgactggtcgttcg

SEQ ID NO: 24917 - DNA, 21 bp, Artificial Sequence
  source: /note="Description of Artificial Sequence: Synthetic oligonucleotide"
tctcaggctacgcagcataat

SEQ ID NO: 24918 - DNA, 21 bp, Artificial Sequence
  source: /note="Description of Artificial Sequence: Synthetic oligonucleotide"
agtcaggctgttcctccgagt

SEQ ID NO: 24919 - DNA, 21 bp, Artificial Sequence
  source: /note="Description of Artificial Sequence: Synthetic oligonucleotide"
tcgcaggatatgtatcggggt

SEQ ID NO: 24920 - DNA, 21 bp, Artificial Sequence
  source: /note="Description of Artificial Sequence: Synthetic oligonucleotide"
tcgcaggataatgttcaggag

SEQ ID NO: 24921 - DNA, 21 bp, Artificial Sequence
  source: /note="Description of Artificial Sequence: Synthetic oligonucleotide"
tcgcaggattggaatcttact

SEQ ID NO: 24922 - DNA, 21 bp, Artificial Sequence
  source: /note="Description of Artificial Sequence: Synthetic oligonucleotide"
tcgcaggagctgcctgggtcg

SEQ ID NO: 24923 - DNA, 21 bp, Artificial Sequence
  source: /note="Description of Artificial Sequence: Synthetic oligonucleotide"
tctcaggagtcgtatatggat

SEQ ID NO: 24924 - DNA, 21 bp, Artificial Sequence
  source: /note="Description of Artificial Sequence: Synthetic oligonucleotide"
agtcagtttgaggctcggccg

SEQ ID NO: 24925 - DNA, 21 bp, Artificial Sequence
  source: /note="Description of Artificial Sequence: Synthetic oligonucleotide"
agtcagtttaagccgacgttt

SEQ ID NO: 24926 - DNA, 21 bp, Artificial Sequence
  source: /note="Description of Artificial Sequence: Synthetic oligonucleotide"
tctcagtttcttgcggatatt

SEQ ID NO: 24927 - DNA, 21 bp, Artificial Sequence
  source: /note="Description of Artificial Sequence: Synthetic oligonucleotide"
agtcagggtgcgcgtaatgat

SEQ ID NO: 24928 - DNA, 21 bp, Artificial Sequence
  source: /note="Description of Artificial Sequence: Synthetic oligonucleotide"
tcgcagggttttaattcgagt

SEQ ID NO: 24929 - DNA, 21 bp, Artificial Sequence
  source: /note="Description of Artificial Sequence: Synthetic oligonucleotide"
agtcaggggcatgctcttcct

SEQ ID NO: 24930 - DNA, 21 bp, Artificial Sequence
  source: /note="Description of Artificial Sequence: Synthetic oligonucleotide"
tcgcagggtagtgttcagggt

SEQ ID NO: 24931 - DNA, 21 bp, Artificial Sequence
  source: /note="Description of Artificial Sequence: Synthetic oligonucleotide"
tctcagggtgtgagggttggg

SEQ ID NO: 24932 - DNA, 21 bp, Artificial Sequence
  source: /note="Description of Artificial Sequence: Synthetic oligonucleotide"
tcgcagcatctttctgttaat

SEQ ID NO: 24933 - DNA, 21 bp, Artificial Sequence
  source: /note="Description of Artificial Sequence: Synthetic oligonucleotide"
tctcagcatccgattagggag

SEQ ID NO: 24934 - DNA, 21 bp, Artificial Sequence
  source: /note="Description of Artificial Sequence: Synthetic oligonucleotide"
agtcagcatccgccgggtgat

SEQ ID NO: 24935 - DNA, 21 bp, Artificial Sequence
  source: /note="Description of Artificial Sequence: Synthetic oligonucleotide"
tctcagcatcgtgatcatccg

SEQ ID NO: 24936 - DNA, 21 bp, Artificial Sequence
  source: /note="Description of Artificial Sequence: Synthetic oligonucleotide"
tcgcagcatgttgcgtctcct

SEQ ID NO: 24937 - DNA, 21 bp, Artificial Sequence
  source: /note="Description of Artificial Sequence: Synthetic oligonucleotide"
tctcagattagttgtgggctt

SEQ ID NO: 24938 - DNA, 21 bp, Artificial Sequence
  source: /note="Description of Artificial Sequence: Synthetic oligonucleotide"
agtcagaagccgatggttgcg

SEQ ID NO: 24939 - DNA, 21 bp, Artificial Sequence
  source: /note="Description of Artificial Sequence: Synthetic oligonucleotide"
tctcagaagtctcatgggaat

SEQ ID NO: 24940 - DNA, 21 bp, Artificial Sequence
  source: /note="Description of Artificial Sequence: Synthetic oligonucleotide"
tctcagcttgatattaatggg

SEQ ID NO: 24941 - DNA, 21 bp, Artificial Sequence
  source: /note="Description of Artificial Sequence: Synthetic oligonucleotide"
tctcagatggatgatactttg

SEQ ID NO: 24942 - DNA, 21 bp, Artificial Sequence
  source: /note="Description of Artificial Sequence: Synthetic oligonucleotide"
agtcagatgcttccggctccg

SEQ ID NO: 24943 - DNA, 21 bp, Artificial Sequence
  source: /note="Description of Artificial Sequence: Synthetic oligonucleotide"
tctcagatgcttactgggccg

SEQ ID NO: 24944 - DNA, 21 bp, Artificial Sequence
  source: /note="Description of Artificial Sequence: Synthetic oligonucleotide"
tcgcagatgcgtgagccggtg

SEQ ID NO: 24945 - DNA, 21 bp, Artificial Sequence
  source: /note="Description of Artificial Sequence: Synthetic oligonucleotide"
tctcagaatttggtgattagt

SEQ ID NO: 24946 - DNA, 21 bp, Artificial Sequence
  source: /note="Description of Artificial Sequence: Synthetic oligonucleotide"
tcgcagaattctttgtcggag

SEQ ID NO: 24947 - DNA, 21 bp, Artificial Sequence
  source: /note="Description of Artificial Sequence: Synthetic oligonucleotide"
tctcagaatactgggcagaat

SEQ ID NO: 24948 - DNA, 21 bp, Artificial Sequence
  source: /note="Description of Artificial Sequence: Synthetic oligonucleotide"
agtcagcctcattttgcgtct

SEQ ID NO: 24949 - DNA, 21 bp, Artificial Sequence
  source: /note="Description of Artificial Sequence: Synthetic oligonucleotide"
tctcagccgatggctaggatg

SEQ ID NO: 24950 - DNA, 21 bp, Artificial Sequence
  source: /note="Description of Artificial Sequence: Synthetic oligonucleotide"
agtcagcctatgcctcctgcg

SEQ ID NO: 24951 - DNA, 21 bp, Artificial Sequence
  source: /note="Description of Artificial Sequence: Synthetic oligonucleotide"
tcgcagcctaatcctgctgtg

SEQ ID NO: 24952 - DNA, 21 bp, Artificial Sequence
  source: /note="Description of Artificial Sequence: Synthetic oligonucleotide"
agtcagccgactactgctagg

SEQ ID NO: 24953 - DNA, 21 bp, Artificial Sequence
  source: /note="Description of Artificial Sequence: Synthetic oligonucleotide"
tctcagccggttactgcgggt

SEQ ID NO: 24954 - DNA, 21 bp, Artificial Sequence
  source: /note="Description of Artificial Sequence: Synthetic oligonucleotide"
tctcagcaggatcctattttg

SEQ ID NO: 24955 - DNA, 21 bp, Artificial Sequence
  source: /note="Description of Artificial Sequence: Synthetic oligonucleotide"
tcgcagcgggcgccgattcct

SEQ ID NO: 24956 - DNA, 21 bp, Artificial Sequence
  source: /note="Description of Artificial Sequence: Synthetic oligonucleotide"
agtcagcgtgctactgcgctt

SEQ ID NO: 24957 - DNA, 21 bp, Artificial Sequence
  source: /note="Description of Artificial Sequence: Synthetic oligonucleotide"
agtcagcggattcttgatact

SEQ ID NO: 24958 - DNA, 21 bp, Artificial Sequence
  source: /note="Description of Artificial Sequence: Synthetic oligonucleotide"
agtcagcgtagtggtcgggag

SEQ ID NO: 24959 - DNA, 21 bp, Artificial Sequence
  source: /note="Description of Artificial Sequence: Synthetic oligonucleotide"
tcgcagcgtagtacgcttacg

SEQ ID NO: 24960 - DNA, 21 bp, Artificial Sequence
  source: /note="Description of Artificial Sequence: Synthetic oligonucleotide"
tctcagcgggtggcttcggag

SEQ ID NO: 24961 - DNA, 21 bp, Artificial Sequence
  source: /note="Description of Artificial Sequence: Synthetic oligonucleotide"
tcgcagagggtttctcagtcg

SEQ ID NO: 24962 - DNA, 21 bp, Artificial Sequence
  source: /note="Description of Artificial Sequence: Synthetic oligonucleotide"
tctcagtcgttttctgttgat

SEQ ID NO: 24963 - DNA, 21 bp, Artificial Sequence
  source: /note="Description of Artificial Sequence: Synthetic oligonucleotide"
tctcagagtggttcttcgaat

SEQ ID NO: 24964 - DNA, 21 bp, Artificial Sequence
  source: /note="Description of Artificial Sequence: Synthetic oligonucleotide"
tcgcagagtatgaggtcttcg

SEQ ID NO: 24965 - DNA, 21 bp, Artificial Sequence
  source: /note="Description of Artificial Sequence: Synthetic oligonucleotide"
tctcagtctcctgtgctgaag

SEQ ID NO: 24966 - DNA, 21 bp, Artificial Sequence
  source: /note="Description of Artificial Sequence: Synthetic oligonucleotide"
tctcagtctcagatgcttccg

SEQ ID NO: 24967 - DNA, 21 bp, Artificial Sequence
  source: /note="Description of Artificial Sequence: Synthetic oligonucleotide"
tcgcagtcgcggttttcggcg

SEQ ID NO: 24968 - DNA, 21 bp, Artificial Sequence
  source: /note="Description of Artificial Sequence: Synthetic oligonucleotide"
tctcagtcgcggatgcagcct

SEQ ID NO: 24969 - DNA, 21 bp, Artificial Sequence
  source: /note="Description of Artificial Sequence: Synthetic oligonucleotide"
tctcagagttctattaggctt

SEQ ID NO: 24970 - DNA, 21 bp, Artificial Sequence
  source: /note="Description of Artificial Sequence: Synthetic oligonucleotide"
tctcagagtagtaattatccg

SEQ ID NO: 24971 - DNA, 21 bp, Artificial Sequence
  source: /note="Description of Artificial Sequence: Synthetic oligonucleotide"
agtcagtcgacgtataatatt

SEQ ID NO: 24972 - DNA, 21 bp, Artificial Sequence
  source: /note="Description of Artificial Sequence: Synthetic oligonucleotide"
tctcagacgggtctgcttact

SEQ ID NO: 24973 - DNA, 21 bp, Artificial Sequence
  source: /note="Description of Artificial Sequence: Synthetic oligonucleotide"
agtcagactattccggattcg

SEQ ID NO: 24974 - DNA, 21 bp, Artificial Sequence
  source: /note="Description of Artificial Sequence: Synthetic oligonucleotide"
agtcagacgaagtcgcagcat

SEQ ID NO: 24975 - DNA, 21 bp, Artificial Sequence
  source: /note="Description of Artificial Sequence: Synthetic oligonucleotide"
agtcagacgcctcgttctacg

SEQ ID NO: 24976 - DNA, 21 bp, Artificial Sequence
  source: /note="Description of Artificial Sequence: Synthetic oligonucleotide"
tcgcagactcagcataggatt

SEQ ID NO: 24977 - DNA, 21 bp, Artificial Sequence
  source: /note="Description of Artificial Sequence: Synthetic oligonucleotide"
tctcagactgttggggtgtct

SEQ ID NO: 24978 - DNA, 21 bp, Artificial Sequence
  source: /note="Description of Artificial Sequence: Synthetic oligonucleotide"
tctcaggtgggtgctccgact

SEQ ID NO: 24979 - DNA, 21 bp, Artificial Sequence
  source: /note="Description of Artificial Sequence: Synthetic oligonucleotide"
tcgcaggttggtatgtatagg

SEQ ID NO: 24980 - DNA, 21 bp, Artificial Sequence
  source: /note="Description of Artificial Sequence: Synthetic oligonucleotide"
tctcagtgggtgcctacgaat

SEQ ID NO: 24981 - DNA, 21 bp, Artificial Sequence
  source: /note="Description of Artificial Sequence: Synthetic oligonucleotide"
agtcagtatgcgtctttggat

SEQ ID NO: 24982 - DNA, 21 bp, Artificial Sequence
  source: /note="Description of Artificial Sequence: Synthetic oligonucleotide"
tcgcagtatactaagtttcag

SEQ ID NO: 24983 - DNA, 21 bp, Artificial Sequence
  source: /note="Description of Artificial Sequence: Synthetic oligonucleotide"
agtcagtatgtgccttcttcg

SEQ ID NO: 24984 - DNA, 21 bp, Artificial Sequence
  source: /note="Description of Artificial Sequence: Synthetic oligonucleotide"
tctcgggcggcgatggatggt

SEQ ID NO: 24985 - DNA, 21 bp, Artificial Sequence
  source: /note="Description of Artificial Sequence: Synthetic oligonucleotide"
agtcgtgctgatatttttctt

SEQ ID NO: 24986 - DNA, 21 bp, Artificial Sequence
  source: /note="Description of Artificial Sequence: Synthetic oligonucleotide"
tcgcgggcgggtcgttcggag

SEQ ID NO: 24987 - DNA, 21 bp, Artificial Sequence
  source: /note="Description of Artificial Sequence: Synthetic oligonucleotide"
tcgcgggcggggactacgacg

SEQ ID NO: 24988 - DNA, 21 bp, Artificial Sequence
  source: /note="Description of Artificial Sequence: Synthetic oligonucleotide"
tcgcgggctattcttgcggat

SEQ ID NO: 24989 - DNA, 21 bp, Artificial Sequence
  source: /note="Description of Artificial Sequence: Synthetic oligonucleotide"
tctcgggcgcttactggtccg

SEQ ID NO: 24990 - DNA, 21 bp, Artificial Sequence
  source: /note="Description of Artificial Sequence: Synthetic oligonucleotide"
tctcgggcgctggtttctgcg

SEQ ID NO: 24991 - DNA, 21 bp, Artificial Sequence
  source: /note="Description of Artificial Sequence: Synthetic oligonucleotide"
tctcgggcgaatcttcattct

SEQ ID NO: 24992 - DNA, 21 bp, Artificial Sequence
  source: /note="Description of Artificial Sequence: Synthetic oligonucleotide"
tcgcgtgcgccgtctcttcct

SEQ ID NO: 24993 - DNA, 21 bp, Artificial Sequence
  source: /note="Description of Artificial Sequence: Synthetic oligonucleotide"
tctcgtgctagtatggcggtt

SEQ ID NO: 24994 - DNA, 21 bp, Artificial Sequence
  source: /note="Description of Artificial Sequence: Synthetic oligonucleotide"
agtcgggcggtttcggatgct

SEQ ID NO: 24995 - DNA, 21 bp, Artificial Sequence
  source: /note="Description of Artificial Sequence: Synthetic oligonucleotide"
tctcgggatgcgattcatgat

SEQ ID NO: 24996 - DNA, 21 bp, Artificial Sequence
  source: /note="Description of Artificial Sequence: Synthetic oligonucleotide"
tctcgtgatgctaagcagtcg

SEQ ID NO: 24997 - DNA, 21 bp, Artificial Sequence
  source: /note="Description of Artificial Sequence: Synthetic oligonucleotide"
agtcgtgatctgttgtcgccg

SEQ ID NO: 24998 - DNA, 21 bp, Artificial Sequence
  source: /note="Description of Artificial Sequence: Synthetic oligonucleotide"
tcgcgggatatgacgaatttt

SEQ ID NO: 24999 - DNA, 21 bp, Artificial Sequence
  source: /note="Description of Artificial Sequence: Synthetic oligonucleotide"
agtcgtgataatcagactgtt

SEQ ID NO: 25000 - DNA, 21 bp, Artificial Sequence
  source: /note="Description of Artificial Sequence: Synthetic oligonucleotide"
agtcgggataggactttgaat

SEQ ID NO: 25001 - DNA, 21 bp, Artificial Sequence
  source: /note="Description of Artificial Sequence: Synthetic oligonucleotide"
tctcgtgattcgggtactagt

SEQ ID NO: 25002 - DNA, 21 bp, Artificial Sequence
  source: /note="Description of Artificial Sequence: Synthetic oligonucleotide"
agtcgtgatagtcagcgtgag

SEQ ID NO: 25003 - DNA, 21 bp, Artificial Sequence
  source: /note="Description of Artificial Sequence: Synthetic oligonucleotide"
tctcgtgatactgggcatacg

SEQ ID NO: 25004 - DNA, 21 bp, Artificial Sequence
  source: /note="Description of Artificial Sequence: Synthetic oligonucleotide"
tcgcgggatacgtcgcatcat

SEQ ID NO: 25005 - DNA, 21 bp, Artificial Sequence
  source: /note="Description of Artificial Sequence: Synthetic oligonucleotide"
tcgcgtgatgttcctcagaat

SEQ ID NO: 25006 - DNA, 21 bp, Artificial Sequence
  source: /note="Description of Artificial Sequence: Synthetic oligonucleotide"
tcgagggattatcagttgaat

SEQ ID NO: 25007 - DNA, 21 bp, Artificial Sequence
  source: /note="Description of Artificial Sequence: Synthetic oligonucleotide"
tcgagggagaaggtgtcggcg

SEQ ID NO: 25008 - DNA, 21 bp, Artificial Sequence
  source: /note="Description of Artificial Sequence: Synthetic oligonucleotide"
tcgagggagctgtcgcgtctg

SEQ ID NO: 25009 - DNA, 21 bp, Artificial Sequence
  source: /note="Description of Artificial Sequence: Synthetic oligonucleotide"
agtcgggagatggctcctagt

SEQ ID NO: 25010 - DNA, 21 bp, Artificial Sequence
  source: /note="Description of Artificial Sequence: Synthetic oligonucleotide"
tctcgtgagcctgctaatatt

SEQ ID NO: 25011 - DNA, 21 bp, Artificial Sequence
  source: /note="Description of Artificial Sequence: Synthetic oligonucleotide"
tcgagggagcagctgagtggg

SEQ ID NO: 25012 - DNA, 21 bp, Artificial Sequence
  source: /note="Description of Artificial Sequence: Synthetic oligonucleotide"
agtagggagtctcggtttgat

SEQ ID NO: 25013 - DNA, 21 bp, Artificial Sequence
  source: /note="Description of Artificial Sequence: Synthetic oligonucleotide"
tctcgtgagtcttatcagcag

SEQ ID NO: 25014 - DNA, 21 bp, Artificial Sequence
  source: /note="Description of Artificial Sequence: Synthetic oligonucleotide"
tcgcgtgagactcgtgcggtt

SEQ ID NO: 25015 - DNA, 21 bp, Artificial Sequence
  source: /note="Description of Artificial Sequence: Synthetic oligonucleotide"
tctcgggaggtggataagact

SEQ ID NO: 25016 - DNA, 21 bp, Artificial Sequence
  source: /note="Description of Artificial Sequence: Synthetic oligonucleotide"
agtcgtgaggttgttgcgtcg

SEQ ID NO: 25017 - DNA, 21 bp, Artificial Sequence
  source: /note="Description of Artificial Sequence: Synthetic oligonucleotide"
tctcggtttgaggcgaatact

SEQ ID NO: 25018 - DNA, 21 bp, Artificial Sequence
  source: /note="Description of Artificial Sequence: Synthetic oligonucleotide"
agtcggtttgagcagctgggg

SEQ ID NO: 25019 - DNA, 21 bp, Artificial Sequence
  source: /note="Description of Artificial Sequence: Synthetic oligonucleotide"
agtcggtttcatcctacggag

SEQ ID NO: 25020 - DNA, 21 bp, Artificial Sequence
  source: /note="Description of Artificial Sequence: Synthetic oligonucleotide"
tcgcgttttcagggttcgggt

SEQ ID NO: 25021 - DNA, 21 bp, Artificial Sequence
  source: /note="Description of Artificial Sequence: Synthetic oligonucleotide"
agtcggtttactactcaggtt

SEQ ID NO: 25022 - DNA, 21 bp, Artificial Sequence
  source: /note="Description of Artificial Sequence: Synthetic oligonucleotide"
tcgcggggtgatccgctgttt

SEQ ID NO: 25023 - DNA, 21 bp, Artificial Sequence
  source: /note="Description of Artificial Sequence: Synthetic oligonucleotide"
tctcggggggatcgtccgatg

SEQ ID NO: 25024 - DNA, 21 bp, Artificial Sequence
  source: /note="Description of Artificial Sequence: Synthetic oligonucleotide"
tctaggggtgatactatggtt

SEQ ID NO: 25025 - DNA, 21 bp, Artificial Sequence
  source: /note="Description of Artificial Sequence: Synthetic oligonucleotide"
agtcgtggtgagcattatgtt

SEQ ID NO: 25026 - DNA, 21 bp, Artificial Sequence
  source: /note="Description of Artificial Sequence: Synthetic oligonucleotide"
tcgaggggtcatgagacgtct

SEQ ID NO: 25027 - DNA, 21 bp, Artificial Sequence
  source: /note="Description of Artificial Sequence: Synthetic oligonucleotide"
tcgcgtgggaaggaggtgatt

SEQ ID NO: 25028 - DNA, 21 bp, Artificial Sequence
  source: /note="Description of Artificial Sequence: Synthetic oligonucleotide"
tcgcgtggttctgagtcgatt

SEQ ID NO: 25029 - DNA, 21 bp, Artificial Sequence
  source: /note="Description of Artificial Sequence: Synthetic oligonucleotide"
agtcgtggggtggataatctt

SEQ ID NO: 25030 - DNA, 21 bp, Artificial Sequence
  source: /note="Description of Artificial Sequence: Synthetic oligonucleotide"
tcgcgtggtgtgtcttctcct

SEQ ID NO: 25031 - DNA, 21 bp, Artificial Sequence
  source: /note="Description of Artificial Sequence: Synthetic oligonucleotide"
tcgcggcatccggtgccgcat

SEQ ID NO: 25032 - DNA, 21 bp, Artificial Sequence
  source: /note="Description of Artificial Sequence: Synthetic oligonucleotide"
tctaggcatcaggctacttcg

SEQ ID NO: 25033 - DNA, 21 bp, Artificial Sequence
  source: /note="Description of Artificial Sequence: Synthetic oligonucleotide"
tcgaggcatacgtcgctttct

SEQ ID NO: 25034 - DNA, 21 bp, Artificial Sequence
  source: /note="Description of Artificial Sequence: Synthetic oligonucleotide"
tcgaggcattatactactgag

SEQ ID NO: 25035 - DNA, 21 bp, Artificial Sequence
  source: /note="Description of Artificial Sequence: Synthetic oligonucleotide"
agtaggattgcggagcctaag

SEQ ID NO: 25036 - DNA, 21 bp, Artificial Sequence
  source: /note="Description of Artificial Sequence: Synthetic oligonucleotide"
tctcggattggtatttcggct

SEQ ID NO: 25037 - DNA, 21 bp, Artificial Sequence
  source: /note="Description of Artificial Sequence: Synthetic oligonucleotide"
tcgcggattttgcggctggat

SEQ ID NO: 25038 - DNA, 21 bp, Artificial Sequence
  source: /note="Description of Artificial Sequence: Synthetic oligonucleotide"
tcgcgtcttggggggcattcg

SEQ ID NO: 25039 - DNA, 21 bp, Artificial Sequence
  source: /note="Description of Artificial Sequence: Synthetic oligonucleotide"
tcgaggcttccgactcaggat

SEQ ID NO: 25040 - DNA, 21 bp, Artificial Sequence
  source: /note="Description of Artificial Sequence: Synthetic oligonucleotide"
tcgcgtctgccttatcctaat

SEQ ID NO: 25041 - DNA, 21 bp, Artificial Sequence
  source: /note="Description of Artificial Sequence: Synthetic oligonucleotide"
tctcgtttgtcgggggcggag

SEQ ID NO: 25042 - DNA, 21 bp, Artificial Sequence
  source: /note="Description of Artificial Sequence: Synthetic oligonucleotide"
agtaggctgtcgcatgagttg

SEQ ID NO: 25043 - DNA, 21 bp, Artificial Sequence
  source: /note="Description of Artificial Sequence: Synthetic oligonucleotide"
tctcggctgactccgccgagt

SEQ ID NO: 25044 - DNA, 21 bp, Artificial Sequence
  source: /note="Description of Artificial Sequence: Synthetic oligonucleotide"
tctaggcttacgccttatcct

SEQ ID NO: 25045 - DNA, 21 bp, Artificial Sequence
  source: /note="Description of Artificial Sequence: Synthetic oligonucleotide"
tctaggttggtgccggttgcg

SEQ ID NO: 25046 - DNA, 21 bp, Artificial Sequence
  source: /note="Description of Artificial Sequence: Synthetic oligonucleotide"
tctcgtatggctattagtgat

SEQ ID NO: 25047 - DNA, 21 bp, Artificial Sequence
  source: /note="Description of Artificial Sequence: Synthetic oligonucleotide"
tctcggatggggcagacttcg

SEQ ID NO: 25048 - DNA, 21 bp, Artificial Sequence
  source: /note="Description of Artificial Sequence: Synthetic oligonucleotide"
tcgaggatgagttttgcgccg

SEQ ID NO: 25049 - DNA, 21 bp, Artificial Sequence
  source: /note="Description of Artificial Sequence: Synthetic oligonucleotide"
agtcgtatgagtcagggtttt

SEQ ID NO: 25050 - DNA, 21 bp, Artificial Sequence
  source: /note="Description of Artificial Sequence: Synthetic oligonucleotide"
tctcggaattcgttggcgctt

SEQ ID NO: 25051 - DNA, 21 bp, Artificial Sequence
  source: /note="Description of Artificial Sequence: Synthetic oligonucleotide"
tctaggaatagtcttttggat

SEQ ID NO: 25052 - DNA, 21 bp, Artificial Sequence
  source: /note="Description of Artificial Sequence: Synthetic oligonucleotide"
tcgaggaatactaatacggat

SEQ ID NO: 25053 - DNA, 21 bp, Artificial Sequence
  source: /note="Description of Artificial Sequence: Synthetic oligonucleotide"
tcgcggaatactcctgttgat

SEQ ID NO: 25054 - DNA, 21 bp, Artificial Sequence
  source: /note="Description of Artificial Sequence: Synthetic oligonucleotide"
tcgcgtccggcgattggttcg

SEQ ID NO: 25055 - DNA, 21 bp, Artificial Sequence
  source: /note="Description of Artificial Sequence: Synthetic oligonucleotide"
tcgcgtcctgctcctgttctt

SEQ ID NO: 25056 - DNA, 21 bp, Artificial Sequence
  source: /note="Description of Artificial Sequence: Synthetic oligonucleotide"
tctcgtcctgcgactaatccg

SEQ ID NO: 25057 - DNA, 21 bp, Artificial Sequence
  source: /note="Description of Artificial Sequence: Synthetic oligonucleotide"
agtcggccggagcctccgtat

SEQ ID NO: 25058 - DNA, 21 bp, Artificial Sequence
  source: /note="Description of Artificial Sequence: Synthetic oligonucleotide"
agtaggccgggttttcagaat

SEQ ID NO: 25059 - DNA, 21 bp, Artificial Sequence
  source: /note="Description of Artificial Sequence: Synthetic oligonucleotide"
tctaggccggggcttacgttt

SEQ ID NO: 25060 - DNA, 21 bp, Artificial Sequence
  source: /note="Description of Artificial Sequence: Synthetic oligonucleotide"
tctcgtcctattactcctttg

SEQ ID NO: 25061 - DNA, 21 bp, Artificial Sequence
  source: /note="Description of Artificial Sequence: Synthetic oligonucleotide"
agtcggccgatgtcgttggag

SEQ ID NO: 25062 - DNA, 21 bp, Artificial Sequence
  source: /note="Description of Artificial Sequence: Synthetic oligonucleotide"
tctcgtccgcgtgatactgat

SEQ ID NO: 25063 - DNA, 21 bp, Artificial Sequence
  source: /note="Description of Artificial Sequence: Synthetic oligonucleotide"
tctcgtccttcggcttatcag

SEQ ID NO: 25064 - DNA, 21 bp, Artificial Sequence
  source: /note="Description of Artificial Sequence: Synthetic oligonucleotide"
tctaggccgtctgatgtttgg

SEQ ID NO: 25065 - DNA, 21 bp, Artificial Sequence
  source: /note="Description of Artificial Sequence: Synthetic oligonucleotide"
tctaggccttctaatgatgct

SEQ ID NO: 25066 - DNA, 21 bp, Artificial Sequence
  source: /note="Description of Artificial Sequence: Synthetic oligonucleotide"
tcgcggcctagttctgagtct

SEQ ID NO: 25067 - DNA, 21 bp, Artificial Sequence
  source: /note="Description of Artificial Sequence: Synthetic oligonucleotide"
agtcgtccgacggcgcaggag

SEQ ID NO: 25068 - DNA, 21 bp, Artificial Sequence
  source: /note="Description of Artificial Sequence: Synthetic oligonucleotide"
tcgcggcctacgtctgcttct

SEQ ID NO: 25069 - DNA, 21 bp, Artificial Sequence
  source: /note="Description of Artificial Sequence: Synthetic oligonucleotide"
tcgcgtcctgtggtgtcgagt

SEQ ID NO: 25070 - DNA, 21 bp, Artificial Sequence
  source: /note="Description of Artificial Sequence: Synthetic oligonucleotide"
tctaggcaggctcttagtgat

SEQ ID NO: 25071 - DNA, 21 bp, Artificial Sequence
  source: /note="Description of Artificial Sequence: Synthetic oligonucleotide"
agtcgtcaggatcattggcct

SEQ ID NO: 25072 - DNA, 21 bp, Artificial Sequence
  source: /note="Description of Artificial Sequence: Synthetic oligonucleotide"
tcgcgtcaggatcctgttatt

SEQ ID NO: 25073 - DNA, 21 bp, Artificial Sequence
  source: /note="Description of Artificial Sequence: Synthetic oligonucleotide"
agtcggcagcttgctccgagt

SEQ ID NO: 25074 - DNA, 21 bp, Artificial Sequence
  source: /note="Description of Artificial Sequence: Synthetic oligonucleotide"
agtaggcagatggagcatgtg

SEQ ID NO: 25075 - DNA, 21 bp, Artificial Sequence
  source: /note="Description of Artificial Sequence: Synthetic oligonucleotide"
tctcgtcagcaggagaggggg

SEQ ID NO: 25076 - DNA, 21 bp, Artificial Sequence
  source: /note="Description of Artificial Sequence: Synthetic oligonucleotide"
agtcggcagcagacgccggat

SEQ ID NO: 25077 - DNA, 21 bp, Artificial Sequence
  source: /note="Description of Artificial Sequence: Synthetic oligonucleotide"
agtaggcagtcgccttcgctg

SEQ ID NO: 25078 - DNA, 21 bp, Artificial Sequence
  source: /note="Description of Artificial Sequence: Synthetic oligonucleotide"
tctcgtcagtctgttcatggt

SEQ ID NO: 25079 - DNA, 21 bp, Artificial Sequence
  source: /note="Description of Artificial Sequence: Synthetic oligonucleotide"
agtcgtaggccttcggatatt

SEQ ID NO: 25080 - DNA, 21 bp, Artificial Sequence
  source: /note="Description of Artificial Sequence: Synthetic oligonucleotide"
agtaggtcggctcttactgat

SEQ ID NO: 25081 - DNA, 21 bp, Artificial Sequence
  source: /note="Description of Artificial Sequence: Synthetic oligonucleotide"
tcgcgttcggagcgtatgcct

SEQ ID NO: 25082 - DNA, 21 bp, Artificial Sequence
  source: /note="Description of Artificial Sequence: Synthetic oligonucleotide"
tcgcgttcgggtcagggtgat

SEQ ID NO: 25083 - DNA, 21 bp, Artificial Sequence
  source: /note="Description of Artificial Sequence: Synthetic oligonucleotide"
agtcggagtggtagtcttccg

SEQ ID NO: 25084 - DNA, 21 bp, Artificial Sequence
  source: /note="Description of Artificial Sequence: Synthetic oligonucleotide"
tctcggtctggtactccgttt

SEQ ID NO: 25085 - DNA, 21 bp, Artificial Sequence
  source: /note="Description of Artificial Sequence: Synthetic oligonucleotide"
tcgcgtagtcatccgagtcag

SEQ ID NO: 25086 - DNA, 21 bp, Artificial Sequence
  source: /note="Description of Artificial Sequence: Synthetic oligonucleotide"
tctcggtcgattatgcagggg

SEQ ID NO: 25087 - DNA, 21 bp, Artificial Sequence
  source: /note="Description of Artificial Sequence: Synthetic oligonucleotide"
tcgcggtctatttcgacggat

SEQ ID NO: 25088 - DNA, 21 bp, Artificial Sequence
  source: /note="Description of Artificial Sequence: Synthetic oligonucleotide"
agtcgttctcttgagagtacg

SEQ ID NO: 25089 - DNA, 21 bp, Artificial Sequence
  source: /note="Description of Artificial Sequence: Synthetic oligonucleotide"
tcgaggtctttgggtacgaat

SEQ ID NO: 25090 - DNA, 21 bp, Artificial Sequence
  source: /note="Description of Artificial Sequence: Synthetic oligonucleotide"
tcgaggagtttgcatcttgtg

SEQ ID NO: 25091 - DNA, 21 bp, Artificial Sequence
  source: /note="Description of Artificial Sequence: Synthetic oligonucleotide"
agtcgttctttgaggcctgat

SEQ ID NO: 25092 - DNA, 21 bp, Artificial Sequence
  source: /note="Description of Artificial Sequence: Synthetic oligonucleotide"
tcgcggtcgaatgctaatatt

SEQ ID NO: 25093 - DNA, 21 bp, Artificial Sequence
  source: /note="Description of Artificial Sequence: Synthetic oligonucleotide"
agtaggagtaatggtgttatt

SEQ ID NO: 25094 - DNA, 21 bp, Artificial Sequence
  source: /note="Description of Artificial Sequence: Synthetic oligonucleotide"
tctaggtctccgggtgtgcat

SEQ ID NO: 25095 - DNA, 21 bp, Artificial Sequence
  source: /note="Description of Artificial Sequence: Synthetic oligonucleotide"
tctcgttctcctatgcagcct

SEQ ID NO: 25096 - DNA, 21 bp, Artificial Sequence
  source: /note="Description of Artificial Sequence: Synthetic oligonucleotide"
tctcgttcgccgccgctgcct

SEQ ID NO: 25097 - DNA, 21 bp, Artificial Sequence
  source: /note="Description of Artificial Sequence: Synthetic oligonucleotide"
tcgaggagtccgccgatgacg

SEQ ID NO: 25098 - DNA, 21 bp, Artificial Sequence
  source: /note="Description of Artificial Sequence: Synthetic oligonucleotide"
tctcgttctcgtacggagacg

SEQ ID NO: 25099 - DNA, 21 bp, Artificial Sequence
  source: /note="Description of Artificial Sequence: Synthetic oligonucleotide"
tctaggtcgtcgggtggtaat

SEQ ID NO: 25100 - DNA, 21 bp, Artificial Sequence
  source: /note="Description of Artificial Sequence: Synthetic oligonucleotide"
tcgcggagttcgggtggttct

SEQ ID NO: 25101 - DNA, 21 bp, Artificial Sequence
  source: /note="Description of Artificial Sequence: Synthetic oligonucleotide"
agtcgtagtgtttcggggacg

SEQ ID NO: 25102 - DNA, 21 bp, Artificial Sequence
  source: /note="Description of Artificial Sequence: Synthetic oligonucleotide"
tcgcggtctgtttcgttgtcg

SEQ ID NO: 25103 - DNA, 21 bp, Artificial Sequence
  source: /note="Description of Artificial Sequence: Synthetic oligonucleotide"
tcgcgtactgctaatgctgct

SEQ ID NO: 25104 - DNA, 21 bp, Artificial Sequence
  source: /note="Description of Artificial Sequence: Synthetic oligonucleotide"
agtaggactgcgtcgtttccg

SEQ ID NO: 25105 - DNA, 21 bp, Artificial Sequence
  source: /note="Description of Artificial Sequence: Synthetic oligonucleotide"
tcgcgtacggcttcgtctggt

SEQ ID NO: 25106 - DNA, 21 bp, Artificial Sequence
  source: /note="Description of Artificial Sequence: Synthetic oligonucleotide"
agtaggactgatacgattaag

SEQ ID NO: 25107 - DNA, 21 bp, Artificial Sequence
  source: /note="Description of Artificial Sequence: Synthetic oligonucleotide"
tctcggactgaggcgcttggt

SEQ ID NO: 25108 - DNA, 21 bp, Artificial Sequence
  source: /note="Description of Artificial Sequence: Synthetic oligonucleotide"
agtcgtacggagcgttctgcg

SEQ ID NO: 25109 - DNA, 21 bp, Artificial Sequence
  source: /note="Description of Artificial Sequence: Synthetic oligonucleotide"
tctcgtacgggggcgtatcct

SEQ ID NO: 25110 - DNA, 21 bp, Artificial Sequence
  source: /note="Description of Artificial Sequence: Synthetic oligonucleotide"
tcgaggactggttcgactttg

SEQ ID NO: 25111 - DNA, 21 bp, Artificial Sequence
  source: /note="Description of Artificial Sequence: Synthetic oligonucleotide"
agtcggactcatgatcaggct

SEQ ID NO: 25112 - DNA, 21 bp, Artificial Sequence
  source: /note="Description of Artificial Sequence: Synthetic oligonucleotide"
tcgcgtactctggttggtgag

SEQ ID NO: 25113 - DNA, 21 bp, Artificial Sequence
  source: /note="Description of Artificial Sequence: Synthetic oligonucleotide"
tctaggacgccgcatattgat

SEQ ID NO: 25114 - DNA, 21 bp, Artificial Sequence
  source: /note="Description of Artificial Sequence: Synthetic oligonucleotide"
agtaggactccgatgtcgatg

SEQ ID NO: 25115 - DNA, 21 bp, Artificial Sequence
  source: /note="Description of Artificial Sequence: Synthetic oligonucleotide"
tctcgtactagtatgccttct

SEQ ID NO: 25116 - DNA, 21 bp, Artificial Sequence
  source: /note="Description of Artificial Sequence: Synthetic oligonucleotide"
agtcgtacttcgcggctggat

SEQ ID NO: 25117 - DNA, 21 bp, Artificial Sequence
  source: /note="Description of Artificial Sequence: Synthetic oligonucleotide"
agtcggactgtggcttcgggt

SEQ ID NO: 25118 - DNA, 21 bp, Artificial Sequence
  source: /note="Description of Artificial Sequence: Synthetic oligonucleotide"
tctcggactgtgcaggcgatg

SEQ ID NO: 25119 - DNA, 21 bp, Artificial Sequence
  source: /note="Description of Artificial Sequence: Synthetic oligonucleotide"
tcgcgtgttgctacgacgttg

SEQ ID NO: 25120 - DNA, 21 bp, Artificial Sequence
  source: /note="Description of Artificial Sequence: Synthetic oligonucleotide"
agtagggtgattcatgttagt

SEQ ID NO: 25121 - DNA, 21 bp, Artificial Sequence
  source: /note="Description of Artificial Sequence: Synthetic oligonucleotide"
agtcgtgttaatgcgccgagt

SEQ ID NO: 25122 - DNA, 21 bp, Artificial Sequence
  source: /note="Description of Artificial Sequence: Synthetic oligonucleotide"
tctcgggttaatgctcaggct

SEQ ID NO: 25123 - DNA, 21 bp, Artificial Sequence
  source: /note="Description of Artificial Sequence: Synthetic oligonucleotide"
agtcgtgtgcctcatagtgat

SEQ ID NO: 25124 - DNA, 21 bp, Artificial Sequence
  source: /note="Description of Artificial Sequence: Synthetic oligonucleotide"
tcgcgggttcctaatctttcg

SEQ ID NO: 25125 - DNA, 21 bp, Artificial Sequence
  source: /note="Description of Artificial Sequence: Synthetic oligonucleotide"
agtcgtgtgcagaatggggtg

SEQ ID NO: 25126 - DNA, 21 bp, Artificial Sequence
  source: /note="Description of Artificial Sequence: Synthetic oligonucleotide"
agtcgtgttagtgctgtgatg

SEQ ID NO: 25127 - DNA, 21 bp, Artificial Sequence
  source: /note="Description of Artificial Sequence: Synthetic oligonucleotide"
agtcgggtgtctgggcagtcg

SEQ ID NO: 25128 - DNA, 21 bp, Artificial Sequence
  source: /note="Description of Artificial Sequence: Synthetic oligonucleotide"
agtagggtttctcaggtgatg

SEQ ID NO: 25129 - DNA, 21 bp, Artificial Sequence
  source: /note="Description of Artificial Sequence: Synthetic oligonucleotide"
tctcgttgggttactattgag

SEQ ID NO: 25130 - DNA, 21 bp, Artificial Sequence
  source: /note="Description of Artificial Sequence: Synthetic oligonucleotide"
tcgaggtatgctacttctggg

SEQ ID NO: 25131 - DNA, 21 bp, Artificial Sequence
  source: /note="Description of Artificial Sequence: Synthetic oligonucleotide"
agtcgttatgaggatccggag

SEQ ID NO: 25132 - DNA, 21 bp, Artificial Sequence
  source: /note="Description of Artificial Sequence: Synthetic oligonucleotide"
agtcgttatgggtcggattct

SEQ ID NO: 25133 - DNA, 21 bp, Artificial Sequence
  source: /note="Description of Artificial Sequence: Synthetic oligonucleotide"
tctcggtataatgggatgggt

SEQ ID NO: 25134 - DNA, 21 bp, Artificial Sequence
  source: /note="Description of Artificial Sequence: Synthetic oligonucleotide"
agtcggtatcctgaggctact

SEQ ID NO: 25135 - DNA, 21 bp, Artificial Sequence
  source: /note="Description of Artificial Sequence: Synthetic oligonucleotide"
tcttctgcttgtattaaggct

SEQ ID NO: 25136 - DNA, 21 bp, Artificial Sequence
  source: /note="Description of Artificial Sequence: Synthetic oligonucleotide"
tcgagtgctgaggctcgtctg

SEQ ID NO: 25137 - DNA, 21 bp, Artificial Sequence
  source: /note="Description of Artificial Sequence: Synthetic oligonucleotide"
tcgtcggcgggtgcgcctttg

SEQ ID NO: 25138 - DNA, 21 bp, Artificial Sequence
  source: /note="Description of Artificial Sequence: Synthetic oligonucleotide"
agtagtgcgggttgggtgggt

SEQ ID NO: 25139 - DNA, 21 bp, Artificial Sequence
  source: /note="Description of Artificial Sequence: Synthetic oligonucleotide"
agttctgctattccgatgaag

SEQ ID NO: 25140 - DNA, 21 bp, Artificial Sequence
  source: /note="Description of Artificial Sequence: Synthetic oligonucleotide"
tcttctgctaatgctccgcgt

SEQ ID NO: 25141 - DNA, 21 bp, Artificial Sequence
  source: /note="Description of Artificial Sequence: Synthetic oligonucleotide"
agtagtgctaatgcgagtact

SEQ ID NO: 25142 - DNA, 21 bp, Artificial Sequence
  source: /note="Description of Artificial Sequence: Synthetic oligonucleotide"
tcgtcggcgccggtttctcct

SEQ ID NO: 25143 - DNA, 21 bp, Artificial Sequence
  source: /note="Description of Artificial Sequence: Synthetic oligonucleotide"
tcttcggctcaggtgtctgtg

SEQ ID NO: 25144 - DNA, 21 bp, Artificial Sequence
  source: /note="Description of Artificial Sequence: Synthetic oligonucleotide"
tcgtcggcgactatgactacg

SEQ ID NO: 25145 - DNA, 21 bp, Artificial Sequence
  source: /note="Description of Artificial Sequence: Synthetic oligonucleotide"
tcttcggatgctagtcgtcgt

SEQ ID NO: 25146 - DNA, 21 bp, Artificial Sequence
  source: /note="Description of Artificial Sequence: Synthetic oligonucleotide"
tctagtgatcatgggcttaag

SEQ ID NO: 25147 - DNA, 21 bp, Artificial Sequence
  source: /note="Description of Artificial Sequence: Synthetic oligonucleotide"
tcttcggatcatattggttgt

SEQ ID NO: 25148 - DNA, 21 bp, Artificial Sequence
  source: /note="Description of Artificial Sequence: Synthetic oligonucleotide"
tctagtgatattaggccgtct

SEQ ID NO: 25149 - DNA, 21 bp, Artificial Sequence
  source: /note="Description of Artificial Sequence: Synthetic oligonucleotide"
agtagtgattcggtgaagcat

SEQ ID NO: 25150 - DNA, 21 bp, Artificial Sequence
  source: /note="Description of Artificial Sequence: Synthetic oligonucleotide"
tcgtctgatacgagtcctggg

SEQ ID NO: 25151 - DNA, 21 bp, Artificial Sequence
  source: /note="Description of Artificial Sequence: Synthetic oligonucleotide"
agttcggatactgtgactgag

SEQ ID NO: 25152 - DNA, 21 bp, Artificial Sequence
  source: /note="Description of Artificial Sequence: Synthetic oligonucleotide"
tcttctgaggctgctaggggg

SEQ ID NO: 25153 - DNA, 21 bp, Artificial Sequence
  source: /note="Description of Artificial Sequence: Synthetic oligonucleotide"
tctagtgaggatgttggtttt

SEQ ID NO: 25154 - DNA, 21 bp, Artificial Sequence
  source: /note="Description of Artificial Sequence: Synthetic oligonucleotide"
agtagtgagcatgggcggaat

SEQ ID NO: 25155 - DNA, 21 bp, Artificial Sequence
  source: /note="Description of Artificial Sequence: Synthetic oligonucleotide"
tcttcggagaagcattcgcct

SEQ ID NO: 25156 - DNA, 21 bp, Artificial Sequence
  source: /note="Description of Artificial Sequence: Synthetic oligonucleotide"
tcttcggagaagcgtcctggt

SEQ ID NO: 25157 - DNA, 21 bp, Artificial Sequence
  source: /note="Description of Artificial Sequence: Synthetic oligonucleotide"
tctagtgagatgtcgggtaat

SEQ ID NO: 25158 - DNA, 21 bp, Artificial Sequence
  source: /note="Description of Artificial Sequence: Synthetic oligonucleotide"
tcgtctgagagggcgcatggt

SEQ ID NO: 25159 - DNA, 21 bp, Artificial Sequence
  source: /note="Description of Artificial Sequence: Synthetic oligonucleotide"
agtagtgagcgggcgtcttct

SEQ ID NO: 25160 - DNA, 21 bp, Artificial Sequence
  source: /note="Description of Artificial Sequence: Synthetic oligonucleotide"
tcttctgagtcgctggggagg

SEQ ID NO: 25161 - DNA, 21 bp, Artificial Sequence
  source: /note="Description of Artificial Sequence: Synthetic oligonucleotide"
tcgtcggagtctcgttggatt

SEQ ID NO: 25162 - DNA, 21 bp, Artificial Sequence
  source: /note="Description of Artificial Sequence: Synthetic oligonucleotide"
tctagttttgcggttgggggg

SEQ ID NO: 25163 - DNA, 21 bp, Artificial Sequence
  source: /note="Description of Artificial Sequence: Synthetic oligonucleotide"
tcgagttttgataggggggcg

SEQ ID NO: 25164 - DNA, 21 bp, Artificial Sequence
  source: /note="Description of Artificial Sequence: Synthetic oligonucleotide"
agttcgtttaagggtacgttt

SEQ ID NO: 25165 - DNA, 21 bp, Artificial Sequence
  source: /note="Description of Artificial Sequence: Synthetic oligonucleotide"
tcgtcttttttgactccttct

SEQ ID NO: 25166 - DNA, 21 bp, Artificial Sequence
  source: /note="Description of Artificial Sequence: Synthetic oligonucleotide"
tctagttttccttctaaggcg

SEQ ID NO: 25167 - DNA, 21 bp, Artificial Sequence
  source: /note="Description of Artificial Sequence: Synthetic oligonucleotide"
tcgtcgtttcggacgcctctg

SEQ ID NO: 25168 - DNA, 21 bp, Artificial Sequence
  source: /note="Description of Artificial Sequence: Synthetic oligonucleotide"
tcttcgggtgcttcgtcgcct

SEQ ID NO: 25169 - DNA, 21 bp, Artificial Sequence
  source: /note="Description of Artificial Sequence: Synthetic oligonucleotide"
tctagtggggatcggagtcat

SEQ ID NO: 25170 - DNA, 21 bp, Artificial Sequence
  source: /note="Description of Artificial Sequence: Synthetic oligonucleotide"
tcgtctggtgaggggtataag

SEQ ID NO: 25171 - DNA, 21 bp, Artificial Sequence
  source: /note="Description of Artificial Sequence: Synthetic oligonucleotide"
tcttctgggtttggtaagcct

SEQ ID NO: 25172 - DNA, 21 bp, Artificial Sequence
  source: /note="Description of Artificial Sequence: Synthetic oligonucleotide"
tcgtcggggattgggcatttt

SEQ ID NO: 25173 - DNA, 21 bp, Artificial Sequence
  source: /note="Description of Artificial Sequence: Synthetic oligonucleotide"
tctagtgggcttgctcgtgct

SEQ ID NO: 25174 - DNA, 21 bp, Artificial Sequence
  source: /note="Description of Artificial Sequence: Synthetic oligonucleotide"
agttcgggtctgatttctgtt

SEQ ID NO: 25175 - DNA, 21 bp, Artificial Sequence
  source: /note="Description of Artificial Sequence: Synthetic oligonucleotide"
tcgagtgggaataatcttcat

SEQ ID NO: 25176 - DNA, 21 bp, Artificial Sequence
  source: /note="Description of Artificial Sequence: Synthetic oligonucleotide"
agttctgggccttctcttgct

SEQ ID NO: 25177 - DNA, 21 bp, Artificial Sequence
  source: /note="Description of Artificial Sequence: Synthetic oligonucleotide"
tcgtcggggcaggtgcgtcag

SEQ ID NO: 25178 - DNA, 21 bp, Artificial Sequence
  source: /note="Description of Artificial Sequence: Synthetic oligonucleotide"
tcgtcgggtcgtcctgttgct

SEQ ID NO: 25179 - DNA, 21 bp, Artificial Sequence
  source: /note="Description of Artificial Sequence: Synthetic oligonucleotide"
agttctggtactatgtcttat

SEQ ID NO: 25180 - DNA, 21 bp, Artificial Sequence
  source: /note="Description of Artificial Sequence: Synthetic oligonucleotide"
tcgtcgcattttagggctgat

SEQ ID NO: 25181 - DNA, 21 bp, Artificial Sequence
  source: /note="Description of Artificial Sequence: Synthetic oligonucleotide"
tcgagtcattttgttgtgact

SEQ ID NO: 25182 - DNA, 21 bp, Artificial Sequence
  source: /note="Description of Artificial Sequence: Synthetic oligonucleotide"
agttcgcatcatcagtttccg

SEQ ID NO: 25183 - DNA, 21 bp, Artificial Sequence
  source: /note="Description of Artificial Sequence: Synthetic oligonucleotide"
agttcgcataaggtggcttgg

SEQ ID NO: 25184 - DNA, 21 bp, Artificial Sequence
  source: /note="Description of Artificial Sequence: Synthetic oligonucleotide"
agtagtcatatgtcgccgtgg

SEQ ID NO: 25185 - DNA, 21 bp, Artificial Sequence
  source: /note="Description of Artificial Sequence: Synthetic oligonucleotide"
tcgtctcatccttcgaggatt

SEQ ID NO: 25186 - DNA, 21 bp, Artificial Sequence
  source: /note="Description of Artificial Sequence: Synthetic oligonucleotide"
agttctcatcaggagaagctt

SEQ ID NO: 25187 - DNA, 21 bp, Artificial Sequence
  source: /note="Description of Artificial Sequence: Synthetic oligonucleotide"
tcgtctcatagggctcttgtt

SEQ ID NO: 25188 - DNA, 21 bp, Artificial Sequence
  source: /note="Description of Artificial Sequence: Synthetic oligonucleotide"
tcttctcatagtctttatact

SEQ ID NO: 25189 - DNA, 21 bp, Artificial Sequence
  source: /note="Description of Artificial Sequence: Synthetic oligonucleotide"
tcttctcattcgtatgttacg

SEQ ID NO: 25190 - DNA, 21 bp, Artificial Sequence
  source: /note="Description of Artificial Sequence: Synthetic oligonucleotide"
tcgtctcatgttacgggttat

SEQ ID NO: 25191 - DNA, 21 bp, Artificial Sequence
  source: /note="Description of Artificial Sequence: Synthetic oligonucleotide"
agtagtattcataatgctgtt

SEQ ID NO: 25192 - DNA, 21 bp, Artificial Sequence
  source: /note="Description of Artificial Sequence: Synthetic oligonucleotide"
tctagtattattttgggtgat

SEQ ID NO: 25193 - DNA, 21 bp, Artificial Sequence
  source: /note="Description of Artificial Sequence: Synthetic oligonucleotide"
tcgagtattcctaggcatccg

SEQ ID NO: 25194 - DNA, 21 bp, Artificial Sequence
  source: /note="Description of Artificial Sequence: Synthetic oligonucleotide"
tctagtattccttcgaatgtt

SEQ ID NO: 25195 - DNA, 21 bp, Artificial Sequence
  source: /note="Description of Artificial Sequence: Synthetic oligonucleotide"
tcgagtattcagacggctcag

SEQ ID NO: 25196 - DNA, 21 bp, Artificial Sequence
  source: /note="Description of Artificial Sequence: Synthetic oligonucleotide"
tctagtattaggcctagtcct

SEQ ID NO: 25197 - DNA, 21 bp, Artificial Sequence
  source: /note="Description of Artificial Sequence: Synthetic oligonucleotide"
tcttctatttcgggtagttcg

SEQ ID NO: 25198 - DNA, 21 bp, Artificial Sequence
  source: /note="Description of Artificial Sequence: Synthetic oligonucleotide"
tcgtcgattagtcctaatggt

SEQ ID NO: 25199 - DNA, 21 bp, Artificial Sequence
  source: /note="Description of Artificial Sequence: Synthetic oligonucleotide"
tcgagtaaggagagtccgctg

SEQ ID NO: 25200 - DNA, 21 bp, Artificial Sequence
  source: /note="Description of Artificial Sequence: Synthetic oligonucleotide"
tcgtctaaggggtatcatttg

SEQ ID NO: 25201 - DNA, 21 bp, Artificial Sequence
  source: /note="Description of Artificial Sequence: Synthetic oligonucleotide"
agttcgaaggggtatctggtt

SEQ ID NO: 25202 - DNA, 21 bp, Artificial Sequence
  source: /note="Description of Artificial Sequence: Synthetic oligonucleotide"
tcgtctaagttggagactgag

SEQ ID NO: 25203 - DNA, 21 bp, Artificial Sequence
  source: /note="Description of Artificial Sequence: Synthetic oligonucleotide"
tcgagtaagatgacggggagt

SEQ ID NO: 25204 - DNA, 21 bp, Artificial Sequence
  source: /note="Description of Artificial Sequence: Synthetic oligonucleotide"
agtagtaagcaggtgacgaat

SEQ ID NO: 25205 - DNA, 21 bp, Artificial Sequence
  source: /note="Description of Artificial Sequence: Synthetic oligonucleotide"
agttctaagtatgctgagaat

SEQ ID NO: 25206 - DNA, 21 bp, Artificial Sequence
  source: /note="Description of Artificial Sequence: Synthetic oligonucleotide"
tcttctcttgcttctggtgct

SEQ ID NO: 25207 - DNA, 21 bp, Artificial Sequence
  source: /note="Description of Artificial Sequence: Synthetic oligonucleotide"
tcgtctcttgatagggagttt

SEQ ID NO: 25208 - DNA, 21 bp, Artificial Sequence
  source: /note="Description of Artificial Sequence: Synthetic oligonucleotide"
tcttcgctgggtgagactctg

SEQ ID NO: 25209 - DNA, 21 bp, Artificial Sequence
  source: /note="Description of Artificial Sequence: Synthetic oligonucleotide"
tcgagtttgattgagctgctt

SEQ ID NO: 25210 - DNA, 21 bp, Artificial Sequence
  source: /note="Description of Artificial Sequence: Synthetic oligonucleotide"
tctagtcttaagattgagacg

SEQ ID NO: 25211 - DNA, 21 bp, Artificial Sequence
  source: /note="Description of Artificial Sequence: Synthetic oligonucleotide"
tcttctcttaagttgaatggt

SEQ ID NO: 25212 - DNA, 21 bp, Artificial Sequence
  source: /note="Description of Artificial Sequence: Synthetic oligonucleotide"
agttctctgaatactggtgcg

SEQ ID NO: 25213 - DNA, 21 bp, Artificial Sequence
  source: /note="Description of Artificial Sequence: Synthetic oligonucleotide"
tcgtctttgcctgctggtcgt

SEQ ID NO: 25214 - DNA, 21 bp, Artificial Sequence
  source: /note="Description of Artificial Sequence: Synthetic oligonucleotide"
tcttcgctgcgtaataatatt

SEQ ID NO: 25215 - DNA, 21 bp, Artificial Sequence
  source: /note="Description of Artificial Sequence: Synthetic oligonucleotide"
tcttcgcttaggcctgctacg

SEQ ID NO: 25216 - DNA, 21 bp, Artificial Sequence
  source: /note="Description of Artificial Sequence: Synthetic oligonucleotide"
agtagtctttcggatcgggat

SEQ ID NO: 25217 - DNA, 21 bp, Artificial Sequence
  source: /note="Description of Artificial Sequence: Synthetic oligonucleotide"
tcttctttgtcgcgtactggg

SEQ ID NO: 25218 - DNA, 21 bp, Artificial Sequence
  source: /note="Description of Artificial Sequence: Synthetic oligonucleotide"
tcgagtatggctaagaaggag

SEQ ID NO: 25219 - DNA, 21 bp, Artificial Sequence
  source: /note="Description of Artificial Sequence: Synthetic oligonucleotide"
tctagtatggctttgggtacg

SEQ ID NO: 25220 - DNA, 21 bp, Artificial Sequence
  source: /note="Description of Artificial Sequence: Synthetic oligonucleotide"
tctagtatggttgatcaggtt

SEQ ID NO: 25221 - DNA, 21 bp, Artificial Sequence
  source: /note="Description of Artificial Sequence: Synthetic oligonucleotide"
agtagtaatgctatgctgcct

SEQ ID NO: 25222 - DNA, 21 bp, Artificial Sequence
  source: /note="Description of Artificial Sequence: Synthetic oligonucleotide"
tcttcgaatgagcatatgcgt

SEQ ID NO: 25223 - DNA, 21 bp, Artificial Sequence
  source: /note="Description of Artificial Sequence: Synthetic oligonucleotide"
agttctaatcttaagcttagt

SEQ ID NO: 25224 - DNA, 21 bp, Artificial Sequence
  source: /note="Description of Artificial Sequence: Synthetic oligonucleotide"
agttctaatcctatgttgagg

SEQ ID NO: 25225 - DNA, 21 bp, Artificial Sequence
  source: /note="Description of Artificial Sequence: Synthetic oligonucleotide"
tcgtcgaatccgcagagggtg

SEQ ID NO: 25226 - DNA, 21 bp, Artificial Sequence
  source: /note="Description of Artificial Sequence: Synthetic oligonucleotide"
agttctaatagggcgagtgtt

SEQ ID NO: 25227 - DNA, 21 bp, Artificial Sequence
  source: /note="Description of Artificial Sequence: Synthetic oligonucleotide"
tcgtcgaataggggtgagctg

SEQ ID NO: 25228 - DNA, 21 bp, Artificial Sequence
  source: /note="Description of Artificial Sequence: Synthetic oligonucleotide"
tcttcgaatagttttcctcgt

SEQ ID NO: 25229 - DNA, 21 bp, Artificial Sequence
  source: /note="Description of Artificial Sequence: Synthetic oligonucleotide"
agttctaattctggtgtgccg

SEQ ID NO: 25230 - DNA, 21 bp, Artificial Sequence
  source: /note="Description of Artificial Sequence: Synthetic oligonucleotide"
tcgtctaatagtcgtgctatt

SEQ ID NO: 25231 - DNA, 21 bp, Artificial Sequence
  source: /note="Description of Artificial Sequence: Synthetic oligonucleotide"
agtagtaattcgagttttgcg

SEQ ID NO: 25232 - DNA, 21 bp, Artificial Sequence
  source: /note="Description of Artificial Sequence: Synthetic oligonucleotide"
tcgtcgaatagtgttattgcg

SEQ ID NO: 25233 - DNA, 21 bp, Artificial Sequence
  source: /note="Description of Artificial Sequence: Synthetic oligonucleotide"
tcttctcctgcgctgaattat

SEQ ID NO: 25234 - DNA, 21 bp, Artificial Sequence
  source: /note="Description of Artificial Sequence: Synthetic oligonucleotide"
tcttcgcctgaggggctggct

SEQ ID NO: 25235 - DNA, 21 bp, Artificial Sequence
  source: /note="Description of Artificial Sequence: Synthetic oligonucleotide"
agttctccgatgcgttctgag

SEQ ID NO: 25236 - DNA, 21 bp, Artificial Sequence
  source: /note="Description of Artificial Sequence: Synthetic oligonucleotide"
tcttctcctccggggaatggg

SEQ ID NO: 25237 - DNA, 21 bp, Artificial Sequence
  source: /note="Description of Artificial Sequence: Synthetic oligonucleotide"
tcgtctcctcggggttttggt

SEQ ID NO: 25238 - DNA, 21 bp, Artificial Sequence
  source: /note="Description of Artificial Sequence: Synthetic oligonucleotide"
agtagtcctcgtcatagtgag

SEQ ID NO: 25239 - DNA, 21 bp, Artificial Sequence
  source: /note="Description of Artificial Sequence: Synthetic oligonucleotide"
tctagtcctagtcttactctt

SEQ ID NO: 25240 - DNA, 21 bp, Artificial Sequence
  source: /note="Description of Artificial Sequence: Synthetic oligonucleotide"
tctagtcctagttctaatggg

SEQ ID NO: 25241 - DNA, 21 bp, Artificial Sequence
  source: /note="Description of Artificial Sequence: Synthetic oligonucleotide"
agttcgcctacgtgttgtcct

SEQ ID NO: 25242 - DNA, 21 bp, Artificial Sequence
  source: /note="Description of Artificial Sequence: Synthetic oligonucleotide"
agttcgcctactatgtttgtt

SEQ ID NO: 25243 - DNA, 21 bp, Artificial Sequence
  source: /note="Description of Artificial Sequence: Synthetic oligonucleotide"
tcgagtcctactcctcttaag

SEQ ID NO: 25244 - DNA, 21 bp, Artificial Sequence
  source: /note="Description of Artificial Sequence: Synthetic oligonucleotide"
agttcgccggttgcttcgtcg

SEQ ID NO: 25245 - DNA, 21 bp, Artificial Sequence
  source: /note="Description of Artificial Sequence: Synthetic oligonucleotide"
agttctcctgttaagactctg

SEQ ID NO: 25246 - DNA, 21 bp, Artificial Sequence
  source: /note="Description of Artificial Sequence: Synthetic oligonucleotide"
agtagtccgtatcctatgatg

SEQ ID NO: 25247 - DNA, 21 bp, Artificial Sequence
  source: /note="Description of Artificial Sequence: Synthetic oligonucleotide"
agttctcaggagcgtaatgtt

SEQ ID NO: 25248 - DNA, 21 bp, Artificial Sequence
  source: /note="Description of Artificial Sequence: Synthetic oligonucleotide"
tcttcgcaggggcctattagg

SEQ ID NO: 25249 - DNA, 21 bp, Artificial Sequence
  source: /note="Description of Artificial Sequence: Synthetic oligonucleotide"
agttctcagaagccggtgctt

SEQ ID NO: 25250 - DNA, 21 bp, Artificial Sequence
  source: /note="Description of Artificial Sequence: Synthetic oligonucleotide"
tctagtcagctgctgttggat

SEQ ID NO: 25251 - DNA, 21 bp, Artificial Sequence
  source: /note="Description of Artificial Sequence: Synthetic oligonucleotide"
tcttcgcagatgctttatccg

SEQ ID NO: 25252 - DNA, 21 bp, Artificial Sequence
  source: /note="Description of Artificial Sequence: Synthetic oligonucleotide"
tctagtcagcctcttgagctg

SEQ ID NO: 25253 - DNA, 21 bp, Artificial Sequence
  source: /note="Description of Artificial Sequence: Synthetic oligonucleotide"
agttcgcagccgatgtcttat

SEQ ID NO: 25254 - DNA, 21 bp, Artificial Sequence
  source: /note="Description of Artificial Sequence: Synthetic oligonucleotide"
tcttcgcagcgtgttccgagt

SEQ ID NO: 25255 - DNA, 21 bp, Artificial Sequence
  source: /note="Description of Artificial Sequence: Synthetic oligonucleotide"
agttcgcagagtatgactctt

SEQ ID NO: 25256 - DNA, 21 bp, Artificial Sequence
  source: /note="Description of Artificial Sequence: Synthetic oligonucleotide"
tcgtctcaggttaagacgttg

SEQ ID NO: 25257 - DNA, 21 bp, Artificial Sequence
  source: /note="Description of Artificial Sequence: Synthetic oligonucleotide"
tcgagtcagtggcatgcgggt

SEQ ID NO: 25258 - DNA, 21 bp, Artificial Sequence
  source: /note="Description of Artificial Sequence: Synthetic oligonucleotide"
agttcgcgggctggtacggag

SEQ ID NO: 25259 - DNA, 21 bp, Artificial Sequence
  source: /note="Description of Artificial Sequence: Synthetic oligonucleotide"
agttctagggatatgacttct

SEQ ID NO: 25260 - DNA, 21 bp, Artificial Sequence
  source: /note="Description of Artificial Sequence: Synthetic oligonucleotide"
tcgtctagggatgttgggcgt

SEQ ID NO: 25261 - DNA, 21 bp, Artificial Sequence
  source: /note="Description of Artificial Sequence: Synthetic oligonucleotide"
tcttctcgggggccgattgct

SEQ ID NO: 25262 - DNA, 21 bp, Artificial Sequence
  source: /note="Description of Artificial Sequence: Synthetic oligonucleotide"
agttctagggggagtccgtct

SEQ ID NO: 25263 - DNA, 21 bp, Artificial Sequence
  source: /note="Description of Artificial Sequence: Synthetic oligonucleotide"
tcgtctcgtggggtgcctggg

SEQ ID NO: 25264 - DNA, 21 bp, Artificial Sequence
  source: /note="Description of Artificial Sequence: Synthetic oligonucleotide"
agtagtcgtattaatcctatg

SEQ ID NO: 25265 - DNA, 21 bp, Artificial Sequence
  source: /note="Description of Artificial Sequence: Synthetic oligonucleotide"
agttcgcggattccggatacg

SEQ ID NO: 25266 - DNA, 21 bp, Artificial Sequence
  source: /note="Description of Artificial Sequence: Synthetic oligonucleotide"
tcttctaggctgaatgagcag

SEQ ID NO: 25267 - DNA, 21 bp, Artificial Sequence
  source: /note="Description of Artificial Sequence: Synthetic oligonucleotide"
agtagtcgtctgtctgcggat

SEQ ID NO: 25268 - DNA, 21 bp, Artificial Sequence
  source: /note="Description of Artificial Sequence: Synthetic oligonucleotide"
tcgtcgaggttgtctgagagt

SEQ ID NO: 25269 - DNA, 21 bp, Artificial Sequence
  source: /note="Description of Artificial Sequence: Synthetic oligonucleotide"
tcttcgcgtccgggtatgagt

SEQ ID NO: 25270 - DNA, 21 bp, Artificial Sequence
  source: /note="Description of Artificial Sequence: Synthetic oligonucleotide"
agttctcgtccgggtcagcat

SEQ ID NO: 25271 - DNA, 21 bp, Artificial Sequence
  source: /note="Description of Artificial Sequence: Synthetic oligonucleotide"
tcttcgaggccgaatgatgat

SEQ ID NO: 25272 - DNA, 21 bp, Artificial Sequence
  source: /note="Description of Artificial Sequence: Synthetic oligonucleotide"
agttctcggccgtcgggttcg

SEQ ID NO: 25273 - DNA, 21 bp, Artificial Sequence
  source: /note="Description of Artificial Sequence: Synthetic oligonucleotide"
agtagtcgtagtgctcagagt

SEQ ID NO: 25274 - DNA, 21 bp, Artificial Sequence
  source: /note="Description of Artificial Sequence: Synthetic oligonucleotide"
tcgtcgaggtcgcctgatctg

SEQ ID NO: 25275 - DNA, 21 bp, Artificial Sequence
  source: /note="Description of Artificial Sequence: Synthetic oligonucleotide"
tcttcgcggactaattcttat

SEQ ID NO: 25276 - DNA, 21 bp, Artificial Sequence
  source: /note="Description of Artificial Sequence: Synthetic oligonucleotide"
agtagtcgtacggttgaggcg

SEQ ID NO: 25277 - DNA, 21 bp, Artificial Sequence
  source: /note="Description of Artificial Sequence: Synthetic oligonucleotide"
tcgtcgtcggcgcttgtgctt

SEQ ID NO: 25278 - DNA, 21 bp, Artificial Sequence
  source: /note="Description of Artificial Sequence: Synthetic oligonucleotide"
tctagttctgcggtggcttcg

SEQ ID NO: 25279 - DNA, 21 bp, Artificial Sequence
  source: /note="Description of Artificial Sequence: Synthetic oligonucleotide"
tcttctagtgagtctgcgtgg

SEQ ID NO: 25280 - DNA, 21 bp, Artificial Sequence
  source: /note="Description of Artificial Sequence: Synthetic oligonucleotide"
tctagttctgggactcatcct

SEQ ID NO: 25281 - DNA, 21 bp, Artificial Sequence
  source: /note="Description of Artificial Sequence: Synthetic oligonucleotide"
agttcgtcgattattcggact

SEQ ID NO: 25282 - DNA, 21 bp, Artificial Sequence
  source: /note="Description of Artificial Sequence: Synthetic oligonucleotide"
tcgagttcgattcgggctaat

SEQ ID NO: 25283 - DNA, 21 bp, Artificial Sequence
  source: /note="Description of Artificial Sequence: Synthetic oligonucleotide"
tcttctagtaagcctcatttg

SEQ ID NO: 25284 - DNA, 21 bp, Artificial Sequence
  source: /note="Description of Artificial Sequence: Synthetic oligonucleotide"
tcgagttcgcttgatagtcgg

SEQ ID NO: 25285 - DNA, 21 bp, Artificial Sequence
  source: /note="Description of Artificial Sequence: Synthetic oligonucleotide"
tcgagttcgcttcagctgggt

SEQ ID NO: 25286 - DNA, 21 bp, Artificial Sequence
  source: /note="Description of Artificial Sequence: Synthetic oligonucleotide"
tcgagttcgttgtcgcattcg

SEQ ID NO: 25287 - DNA, 21 bp, Artificial Sequence
  source: /note="Description of Artificial Sequence: Synthetic oligonucleotide"
tcgtcttcgatgagggagagg

SEQ ID NO: 25288 - DNA, 21 bp, Artificial Sequence
  source: /note="Description of Artificial Sequence: Synthetic oligonucleotide"
tcgagtagtaatacgctgact

SEQ ID NO: 25289 - DNA, 21 bp, Artificial Sequence
  source: /note="Description of Artificial Sequence: Synthetic oligonucleotide"
tcgagtagtagggcggttgag

SEQ ID NO: 25290 - DNA, 21 bp, Artificial Sequence
  source: /note="Description of Artificial Sequence: Synthetic oligonucleotide"
tcgtcttcgcggcctactcag

SEQ ID NO: 25291 - DNA, 21 bp, Artificial Sequence
  source: /note="Description of Artificial Sequence: Synthetic oligonucleotide"
tcttcttcgtctaagactcct

SEQ ID NO: 25292 - DNA, 21 bp, Artificial Sequence
  source: /note="Description of Artificial Sequence: Synthetic oligonucleotide"
tcgtcttctagtctttatact

SEQ ID NO: 25293 - DNA, 21 bp, Artificial Sequence
  source: /note="Description of Artificial Sequence: Synthetic oligonucleotide"
agttctagttcgccgcgtgct

SEQ ID NO: 25294 - DNA, 21 bp, Artificial Sequence
  source: /note="Description of Artificial Sequence: Synthetic oligonucleotide"
tcgtctagttcgtcgcggccg

SEQ ID NO: 25295 - DNA, 21 bp, Artificial Sequence
  source: /note="Description of Artificial Sequence: Synthetic oligonucleotide"
agttcttcgtctgttcgggcg

SEQ ID NO: 25296 - DNA, 21 bp, Artificial Sequence
  source: /note="Description of Artificial Sequence: Synthetic oligonucleotide"
agttcgtctactccgccgttg

SEQ ID NO: 25297 - DNA, 21 bp, Artificial Sequence
  source: /note="Description of Artificial Sequence: Synthetic oligonucleotide"
tcgagttcgactcctccttct

SEQ ID NO: 25298 - DNA, 21 bp, Artificial Sequence
  source: /note="Description of Artificial Sequence: Synthetic oligonucleotide"
agttcttcgactccgccgact

SEQ ID NO: 25299 - DNA, 21 bp, Artificial Sequence
  source: /note="Description of Artificial Sequence: Synthetic oligonucleotide"
tcgagttctacgtctactggt

SEQ ID NO: 25300 - DNA, 21 bp, Artificial Sequence
  source: /note="Description of Artificial Sequence: Synthetic oligonucleotide"
tcttcgtctactgttcagttt

SEQ ID NO: 25301 - DNA, 21 bp, Artificial Sequence
  source: /note="Description of Artificial Sequence: Synthetic oligonucleotide"
agttcgtcggttagtaataat

SEQ ID NO: 25302 - DNA, 21 bp, Artificial Sequence
  source: /note="Description of Artificial Sequence: Synthetic oligonucleotide"
tctagttcgtataatggtaag

SEQ ID NO: 25303 - DNA, 21 bp, Artificial Sequence
  source: /note="Description of Artificial Sequence: Synthetic oligonucleotide"
tcgagtacggagtctattagg

SEQ ID NO: 25304 - DNA, 21 bp, Artificial Sequence
  source: /note="Description of Artificial Sequence: Synthetic oligonucleotide"
tcgagtacgcatgagaagccg

SEQ ID NO: 25305 - DNA, 21 bp, Artificial Sequence
  source: /note="Description of Artificial Sequence: Synthetic oligonucleotide"
tcgagtacgaagtcgcttgct

SEQ ID NO: 25306 - DNA, 21 bp, Artificial Sequence
  source: /note="Description of Artificial Sequence: Synthetic oligonucleotide"
tcttctacgccgccgaagtat

SEQ ID NO: 25307 - DNA, 21 bp, Artificial Sequence
  source: /note="Description of Artificial Sequence: Synthetic oligonucleotide"
tcgtctactcctacttcgcat

SEQ ID NO: 25308 - DNA, 21 bp, Artificial Sequence
  source: /note="Description of Artificial Sequence: Synthetic oligonucleotide"
tcttctacgccgactactgcg

SEQ ID NO: 25309 - DNA, 21 bp, Artificial Sequence
  source: /note="Description of Artificial Sequence: Synthetic oligonucleotide"
agttcgacgcgtgatgctcat

SEQ ID NO: 25310 - DNA, 21 bp, Artificial Sequence
  source: /note="Description of Artificial Sequence: Synthetic oligonucleotide"
tcgagtacgcgtacgcctcct

SEQ ID NO: 25311 - DNA, 21 bp, Artificial Sequence
  source: /note="Description of Artificial Sequence: Synthetic oligonucleotide"
tctagtacttctagtcggttt

SEQ ID NO: 25312 - DNA, 21 bp, Artificial Sequence
  source: /note="Description of Artificial Sequence: Synthetic oligonucleotide"
agttcgacgtcgacgcttttg

SEQ ID NO: 25313 - DNA, 21 bp, Artificial Sequence
  source: /note="Description of Artificial Sequence: Synthetic oligonucleotide"
tcgtctactactatgattgag

SEQ ID NO: 25314 - DNA, 21 bp, Artificial Sequence
  source: /note="Description of Artificial Sequence: Synthetic oligonucleotide"
agttcggttgcttcgactgtt

SEQ ID NO: 25315 - DNA, 21 bp, Artificial Sequence
  source: /note="Description of Artificial Sequence: Synthetic oligonucleotide"
tcgtctgttgggagtgctggt

SEQ ID NO: 25316 - DNA, 21 bp, Artificial Sequence
  source: /note="Description of Artificial Sequence: Synthetic oligonucleotide"
tcgagtgtgcatctttatcct

SEQ ID NO: 25317 - DNA, 21 bp, Artificial Sequence
  source: /note="Description of Artificial Sequence: Synthetic oligonucleotide"
tcgtctgttcattcgaggatg

SEQ ID NO: 25318 - DNA, 21 bp, Artificial Sequence
  source: /note="Description of Artificial Sequence: Synthetic oligonucleotide"
tcttctgttaatacgtctggt

SEQ ID NO: 25319 - DNA, 21 bp, Artificial Sequence
  source: /note="Description of Artificial Sequence: Synthetic oligonucleotide"
tcgagtgtgcctcgtccgtct

SEQ ID NO: 25320 - DNA, 21 bp, Artificial Sequence
  source: /note="Description of Artificial Sequence: Synthetic oligonucleotide"
agttcggtgcgtttgttgtcg

SEQ ID NO: 25321 - DNA, 21 bp, Artificial Sequence
  source: /note="Description of Artificial Sequence: Synthetic oligonucleotide"
tcgagtgtttcggggttgagt

SEQ ID NO: 25322 - DNA, 21 bp, Artificial Sequence
  source: /note="Description of Artificial Sequence: Synthetic oligonucleotide"
tcttctgttacgcggacgggg

SEQ ID NO: 25323 - DNA, 21 bp, Artificial Sequence
  source: /note="Description of Artificial Sequence: Synthetic oligonucleotide"
tcttctgtgacggtttcttct

SEQ ID NO: 25324 - DNA, 21 bp, Artificial Sequence
  source: /note="Description of Artificial Sequence: Synthetic oligonucleotide"
tcgagtgttgttcatggggtg

SEQ ID NO: 25325 - DNA, 21 bp, Artificial Sequence
  source: /note="Description of Artificial Sequence: Synthetic oligonucleotide"
tcgtcggtggttccgtctatg

SEQ ID NO: 25326 - DNA, 21 bp, Artificial Sequence
  source: /note="Description of Artificial Sequence: Synthetic oligonucleotide"
tctagttggcagccttttgag

SEQ ID NO: 25327 - DNA, 21 bp, Artificial Sequence
  source: /note="Description of Artificial Sequence: Synthetic oligonucleotide"
agttcttatgctccgttgcat

SEQ ID NO: 25328 - DNA, 21 bp, Artificial Sequence
  source: /note="Description of Artificial Sequence: Synthetic oligonucleotide"
agtagttatgcgtctgggtcg

SEQ ID NO: 25329 - DNA, 21 bp, Artificial Sequence
  source: /note="Description of Artificial Sequence: Synthetic oligonucleotide"
agttcgtatgattctagtaag

SEQ ID NO: 25330 - DNA, 21 bp, Artificial Sequence
  source: /note="Description of Artificial Sequence: Synthetic oligonucleotide"
tcgagttatgagaaggggact

SEQ ID NO: 25331 - DNA, 21 bp, Artificial Sequence
  source: /note="Description of Artificial Sequence: Synthetic oligonucleotide"
tcgtcttatcatgggcttacg

SEQ ID NO: 25332 - DNA, 21 bp, Artificial Sequence
  source: /note="Description of Artificial Sequence: Synthetic oligonucleotide"
tctagttatcatcctgcggag

SEQ ID NO: 25333 - DNA, 21 bp, Artificial Sequence
  source: /note="Description of Artificial Sequence: Synthetic oligonucleotide"
tcttcgtatcctgggcattcg

SEQ ID NO: 25334 - DNA, 21 bp, Artificial Sequence
  source: /note="Description of Artificial Sequence: Synthetic oligonucleotide"
tcgtcgtatagtgttccggag

SEQ ID NO: 25335 - DNA, 21 bp, Artificial Sequence
  source: /note="Description of Artificial Sequence: Synthetic oligonucleotide"
tctacggctattactattcat

SEQ ID NO: 25336 - DNA, 21 bp, Artificial Sequence
  source: /note="Description of Artificial Sequence: Synthetic oligonucleotide"
tcgactgcgcttggtattgtt

SEQ ID NO: 25337 - DNA, 21 bp, Artificial Sequence
  source: /note="Description of Artificial Sequence: Synthetic oligonucleotide"
agtactgctaatgctcagact

SEQ ID NO: 25338 - DNA, 21 bp, Artificial Sequence
  source: /note="Description of Artificial Sequence: Synthetic oligonucleotide"
agtacggctccgggtgctgcg

SEQ ID NO: 25339 - DNA, 21 bp, Artificial Sequence
  source: /note="Description of Artificial Sequence: Synthetic oligonucleotide"
tctacggctcgggctagtact

SEQ ID NO: 25340 - DNA, 21 bp, Artificial Sequence
  source: /note="Description of Artificial Sequence: Synthetic oligonucleotide"
tcgacggcgcggctgcgggat

SEQ ID NO: 25341 - DNA, 21 bp, Artificial Sequence
  source: /note="Description of Artificial Sequence: Synthetic oligonucleotide"
agtacggcgacgcagttgatg

SEQ ID NO: 25342 - DNA, 21 bp, Artificial Sequence
  source: /note="Description of Artificial Sequence: Synthetic oligonucleotide"
tctacgtgtcatccttcgggt

SEQ ID NO: 25343 - DNA, 21 bp, Artificial Sequence
  source: /note="Description of Artificial Sequence: Synthetic oligonucleotide"
tctacggatgagcatgtgatg

SEQ ID NO: 25344 - DNA, 21 bp, Artificial Sequence
  source: /note="Description of Artificial Sequence: Synthetic oligonucleotide"
tcgactgatcatacggcttat

SEQ ID NO: 25345 - DNA, 21 bp, Artificial Sequence
  source: /note="Description of Artificial Sequence: Synthetic oligonucleotide"
agtactgatttgaggcaggct

SEQ ID NO: 25346 - DNA, 21 bp, Artificial Sequence
  source: /note="Description of Artificial Sequence: Synthetic oligonucleotide"
tcgacggatatgcggcatatt

SEQ ID NO: 25347 - DNA, 21 bp, Artificial Sequence
  source: /note="Description of Artificial Sequence: Synthetic oligonucleotide"
tcgactgataatgatcttcgg

SEQ ID NO: 25348 - DNA, 21 bp, Artificial Sequence
  source: /note="Description of Artificial Sequence: Synthetic oligonucleotide"
agtacggatacgaatcatcag

SEQ ID NO: 25349 - DNA, 21 bp, Artificial Sequence
  source: /note="Description of Artificial Sequence: Synthetic oligonucleotide"
tctacggatgtgaagacgcag

SEQ ID NO: 25350 - DNA, 21 bp, Artificial Sequence
  source: /note="Description of Artificial Sequence: Synthetic oligonucleotide"
tctacggagtttaagtcggct

SEQ ID NO: 25351 - DNA, 21 bp, Artificial Sequence
  source: /note="Description of Artificial Sequence: Synthetic oligonucleotide"
tctacggagcgtcctatgcct

SEQ ID NO: 25352 - DNA, 21 bp, Artificial Sequence
  source: /note="Description of Artificial Sequence: Synthetic oligonucleotide"
tctactgagactgcgcagagt

SEQ ID NO: 25353 - DNA, 21 bp, Artificial Sequence
  source: /note="Description of Artificial Sequence: Synthetic oligonucleotide"
tcgacgtttaagaatgttgtt

SEQ ID NO: 25354 - DNA, 21 bp, Artificial Sequence
  source: /note="Description of Artificial Sequence: Synthetic oligonucleotide"
tcgacgtttaattcggctggt

SEQ ID NO: 25355 - DNA, 21 bp, Artificial Sequence
  source: /note="Description of Artificial Sequence: Synthetic oligonucleotide"
agtacttttagttcttcgatg

SEQ ID NO: 25356 - DNA, 21 bp, Artificial Sequence
  source: /note="Description of Artificial Sequence: Synthetic oligonucleotide"
tcgacgtttgtgactgcgggg

SEQ ID NO: 25357 - DNA, 21 bp, Artificial Sequence
  source: /note="Description of Artificial Sequence: Synthetic oligonucleotide"
tcgacttttgtgactaggagt

SEQ ID NO: 25358 - DNA, 21 bp, Artificial Sequence
  source: /note="Description of Artificial Sequence: Synthetic oligonucleotide"
agtacgggtgctttgccttct

SEQ ID NO: 25359 - DNA, 21 bp, Artificial Sequence
  source: /note="Description of Artificial Sequence: Synthetic oligonucleotide"
tctacgggtgctatgctgcat

SEQ ID NO: 25360 - DNA, 21 bp, Artificial Sequence
  source: /note="Description of Artificial Sequence: Synthetic oligonucleotide"
agtactggggctcctcctgat

SEQ ID NO: 25361 - DNA, 21 bp, Artificial Sequence
  source: /note="Description of Artificial Sequence: Synthetic oligonucleotide"
agtactggtatgggtgctttt

SEQ ID NO: 25362 - DNA, 21 bp, Artificial Sequence
  source: /note="Description of Artificial Sequence: Synthetic oligonucleotide"
tcgactggtccgtttcttccg

SEQ ID NO: 25363 - DNA, 21 bp, Artificial Sequence
  source: /note="Description of Artificial Sequence: Synthetic oligonucleotide"
tcgacggggtcggctcagact

SEQ ID NO: 25364 - DNA, 21 bp, Artificial Sequence
  source: /note="Description of Artificial Sequence: Synthetic oligonucleotide"
tcgacgggttcgacgctgcag

SEQ ID NO: 25365 - DNA, 21 bp, Artificial Sequence
  source: /note="Description of Artificial Sequence: Synthetic oligonucleotide"
agtacggggtatggtggtctg

SEQ ID NO: 25366 - DNA, 21 bp, Artificial Sequence
  source: /note="Description of Artificial Sequence: Synthetic oligonucleotide"
agtacgcatatttctcctcct

SEQ ID NO: 25367 - DNA, 21 bp, Artificial Sequence
  source: /note="Description of Artificial Sequence: Synthetic oligonucleotide"
agtacgcatatgcggcttgcg

SEQ ID NO: 25368 - DNA, 21 bp, Artificial Sequence
  source: /note="Description of Artificial Sequence: Synthetic oligonucleotide"
tctactcataatctgacttcg

SEQ ID NO: 25369 - DNA, 21 bp, Artificial Sequence
  source: /note="Description of Artificial Sequence: Synthetic oligonucleotide"
agtactcatcgggattcgagt

SEQ ID NO: 25370 - DNA, 21 bp, Artificial Sequence
  source: /note="Description of Artificial Sequence: Synthetic oligonucleotide"
tctacgcatcgtagtcttgct

SEQ ID NO: 25371 - DNA, 21 bp, Artificial Sequence
  source: /note="Description of Artificial Sequence: Synthetic oligonucleotide"
tcgacgcattcgtatccggtg

SEQ ID NO: 25372 - DNA, 21 bp, Artificial Sequence
  source: /note="Description of Artificial Sequence: Synthetic oligonucleotide"
tcgactcatgtgtcgagtacg

SEQ ID NO: 25373 - DNA, 21 bp, Artificial Sequence
  source: /note="Description of Artificial Sequence: Synthetic oligonucleotide"
agtactattgcgggtacgccg

SEQ ID NO: 25374 - DNA, 21 bp, Artificial Sequence
  source: /note="Description of Artificial Sequence: Synthetic oligonucleotide"
agtactattagtgctcttgcg

SEQ ID NO: 25375 - DNA, 21 bp, Artificial Sequence
  source: /note="Description of Artificial Sequence: Synthetic oligonucleotide"
agtactaaggagtcgcagctt

SEQ ID NO: 25376 - DNA, 21 bp, Artificial Sequence
  source: /note="Description of Artificial Sequence: Synthetic oligonucleotide"
agtactaagtctgggactcct

SEQ ID NO: 25377 - DNA, 21 bp, Artificial Sequence
  source: /note="Description of Artificial Sequence: Synthetic oligonucleotide"
tctacgaagactcctcctgcg

SEQ ID NO: 25378 - DNA, 21 bp, Artificial Sequence
  source: /note="Description of Artificial Sequence: Synthetic oligonucleotide"
agtacgaagtattcgtctgtt

SEQ ID NO: 25379 - DNA, 21 bp, Artificial Sequence
  source: /note="Description of Artificial Sequence: Synthetic oligonucleotide"
tcgactcttgcgcgggataat

SEQ ID NO: 25380 - DNA, 21 bp, Artificial Sequence
  source: /note="Description of Artificial Sequence: Synthetic oligonucleotide"
agtacgttggcgcgggtgcct

SEQ ID NO: 25381 - DNA, 21 bp, Artificial Sequence
  source: /note="Description of Artificial Sequence: Synthetic oligonucleotide"
agtactctgtgtcctgttctt

SEQ ID NO: 25382 - DNA, 21 bp, Artificial Sequence
  source: /note="Description of Artificial Sequence: Synthetic oligonucleotide"
tctactctgggtgggggttat

SEQ ID NO: 25383 - DNA, 21 bp, Artificial Sequence
  source: /note="Description of Artificial Sequence: Synthetic oligonucleotide"
tcgacgttgaataatgttccg

SEQ ID NO: 25384 - DNA, 21 bp, Artificial Sequence
  source: /note="Description of Artificial Sequence: Synthetic oligonucleotide"
tcgactcttccttcgcctgag

SEQ ID NO: 25385 - DNA, 21 bp, Artificial Sequence
  source: /note="Description of Artificial Sequence: Synthetic oligonucleotide"
agtactctgccgtctcgtcct

SEQ ID NO: 25386 - DNA, 21 bp, Artificial Sequence
  source: /note="Description of Artificial Sequence: Synthetic oligonucleotide"
tctacgctgaggtgtggggag

SEQ ID NO: 25387 - DNA, 21 bp, Artificial Sequence
  source: /note="Description of Artificial Sequence: Synthetic oligonucleotide"
tcgacgttggtgaagaatgct

SEQ ID NO: 25388 - DNA, 21 bp, Artificial Sequence
  source: /note="Description of Artificial Sequence: Synthetic oligonucleotide"
tctactttggttcgtgctgag

SEQ ID NO: 25389 - DNA, 21 bp, Artificial Sequence
  source: /note="Description of Artificial Sequence: Synthetic oligonucleotide"
tctactatggcggggaggcat

SEQ ID NO: 25390 - DNA, 21 bp, Artificial Sequence
  source: /note="Description of Artificial Sequence: Synthetic oligonucleotide"
tcgactatgattgctcattct

SEQ ID NO: 25391 - DNA, 21 bp, Artificial Sequence
  source: /note="Description of Artificial Sequence: Synthetic oligonucleotide"
agtactatgctgttgccgtct

SEQ ID NO: 25392 - DNA, 21 bp, Artificial Sequence
  source: /note="Description of Artificial Sequence: Synthetic oligonucleotide"
tcgacgatgaatcgtggtctg

SEQ ID NO: 25393 - DNA, 21 bp, Artificial Sequence
  source: /note="Description of Artificial Sequence: Synthetic oligonucleotide"
agtacgatgcgtccgcagttg

SEQ ID NO: 25394 - DNA, 21 bp, Artificial Sequence
  source: /note="Description of Artificial Sequence: Synthetic oligonucleotide"
tctacgatgtctgttaaggag

SEQ ID NO: 25395 - DNA, 21 bp, Artificial Sequence
  source: /note="Description of Artificial Sequence: Synthetic oligonucleotide"
tcgactaatgctacttctaat

SEQ ID NO: 25396 - DNA, 21 bp, Artificial Sequence
  source: /note="Description of Artificial Sequence: Synthetic oligonucleotide"
tctactaatattgtggagtat

SEQ ID NO: 25397 - DNA, 21 bp, Artificial Sequence
  source: /note="Description of Artificial Sequence: Synthetic oligonucleotide"
tcgacgaatcggtcgacggtg

SEQ ID NO: 25398 - DNA, 21 bp, Artificial Sequence
  source: /note="Description of Artificial Sequence: Synthetic oligonucleotide"
tcgactaatactgctctgtgg

SEQ ID NO: 25399 - DNA, 21 bp, Artificial Sequence
  source: /note="Description of Artificial Sequence: Synthetic oligonucleotide"
agtactaatacgccgcgtggt

SEQ ID NO: 25400 - DNA, 21 bp, Artificial Sequence
  source: /note="Description of Artificial Sequence: Synthetic oligonucleotide"
tcgactaatacgcaggcttat

SEQ ID NO: 25401 - DNA, 21 bp, Artificial Sequence
  source: /note="Description of Artificial Sequence: Synthetic oligonucleotide"
tcgacgaatactagggaggag

SEQ ID NO: 25402 - DNA, 21 bp, Artificial Sequence
  source: /note="Description of Artificial Sequence: Synthetic oligonucleotide"
tcgacgaatgtggggcttgct

SEQ ID NO: 25403 - DNA, 21 bp, Artificial Sequence
  source: /note="Description of Artificial Sequence: Synthetic oligonucleotide"
agtactccggcgaagtatggt

SEQ ID NO: 25404 - DNA, 21 bp, Artificial Sequence
  source: /note="Description of Artificial Sequence: Synthetic oligonucleotide"
agtacgcctgcgtctcgtgcg

SEQ ID NO: 25405 - DNA, 21 bp, Artificial Sequence
  source: /note="Description of Artificial Sequence: Synthetic oligonucleotide"
agtactccggataatcatacg

SEQ ID NO: 25406 - DNA, 21 bp, Artificial Sequence
  source: /note="Description of Artificial Sequence: Synthetic oligonucleotide"
agtactccggatcgtcagacg

SEQ ID NO: 25407 - DNA, 21 bp, Artificial Sequence
  source: /note="Description of Artificial Sequence: Synthetic oligonucleotide"
tcgacgccgcatacgaatgcg

SEQ ID NO: 25408 - DNA, 21 bp, Artificial Sequence
  source: /note="Description of Artificial Sequence: Synthetic oligonucleotide"
tctacgccgaagccttcgcct

SEQ ID NO: 25409 - DNA, 21 bp, Artificial Sequence
  source: /note="Description of Artificial Sequence: Synthetic oligonucleotide"
agtacgccgttgattgctaag

SEQ ID NO: 25410 - DNA, 21 bp, Artificial Sequence
  source: /note="Description of Artificial Sequence: Synthetic oligonucleotide"
tctacgccgttgcctaggacg

SEQ ID NO: 25411 - DNA, 21 bp, Artificial Sequence
  source: /note="Description of Artificial Sequence: Synthetic oligonucleotide"
agtactccgttgcagactccg

SEQ ID NO: 25412 - DNA, 21 bp, Artificial Sequence
  source: /note="Description of Artificial Sequence: Synthetic oligonucleotide"
agtactccgctgcgtacgagt

SEQ ID NO: 25413 - DNA, 21 bp, Artificial Sequence
  source: /note="Description of Artificial Sequence: Synthetic oligonucleotide"
tcgactcctaatgctcggatt

SEQ ID NO: 25414 - DNA, 21 bp, Artificial Sequence
  source: /note="Description of Artificial Sequence: Synthetic oligonucleotide"
tcgactccgaatatgaatagg

SEQ ID NO: 25415 - DNA, 21 bp, Artificial Sequence
  source: /note="Description of Artificial Sequence: Synthetic oligonucleotide"
agtactcctccggctcgttct

SEQ ID NO: 25416 - DNA, 21 bp, Artificial Sequence
  source: /note="Description of Artificial Sequence: Synthetic oligonucleotide"
tctacgccgccgctgtatgag

SEQ ID NO: 25417 - DNA, 21 bp, Artificial Sequence
  source: /note="Description of Artificial Sequence: Synthetic oligonucleotide"
agtacgcctcctactacgctg

SEQ ID NO: 25418 - DNA, 21 bp, Artificial Sequence
  source: /note="Description of Artificial Sequence: Synthetic oligonucleotide"
tctactcctcgtccgcatgat

SEQ ID NO: 25419 - DNA, 21 bp, Artificial Sequence
  source: /note="Description of Artificial Sequence: Synthetic oligonucleotide"
tctacgcctactggggctctg

SEQ ID NO: 25420 - DNA, 21 bp, Artificial Sequence
  source: /note="Description of Artificial Sequence: Synthetic oligonucleotide"
tcgacgcagcagcgttctggt

SEQ ID NO: 25421 - DNA, 21 bp, Artificial Sequence
  source: /note="Description of Artificial Sequence: Synthetic oligonucleotide"
tctactcagcgtgctgctgcg

SEQ ID NO: 25422 - DNA, 21 bp, Artificial Sequence
  source: /note="Description of Artificial Sequence: Synthetic oligonucleotide"
tcgacgcaggttcatctgttg

SEQ ID NO: 25423 - DNA, 21 bp, Artificial Sequence
  source: /note="Description of Artificial Sequence: Synthetic oligonucleotide"
tcgacgcaggtgcatatgatg

SEQ ID NO: 25424 - DNA, 21 bp, Artificial Sequence
  source: /note="Description of Artificial Sequence: Synthetic oligonucleotide"
agtactcaggtgccgaataag

SEQ ID NO: 25425 - DNA, 21 bp, Artificial Sequence
  source: /note="Description of Artificial Sequence: Synthetic oligonucleotide"
tctactcagtggcggactgag

SEQ ID NO: 25426 - DNA, 21 bp, Artificial Sequence
  source: /note="Description of Artificial Sequence: Synthetic oligonucleotide"
tcgactcagtatagtccggtg

SEQ ID NO: 25427 - DNA, 21 bp, Artificial Sequence
  source: /note="Description of Artificial Sequence: Synthetic oligonucleotide"
tcgactcgggcgcctacggcg

SEQ ID NO: 25428 - DNA, 21 bp, Artificial Sequence
  source: /note="Description of Artificial Sequence: Synthetic oligonucleotide"
tctacgcgtgatacttcgaat

SEQ ID NO: 25429 - DNA, 21 bp, Artificial Sequence
  source: /note="Description of Artificial Sequence: Synthetic oligonucleotide"
tctacgcgtgaggcgaagccg

SEQ ID NO: 25430 - DNA, 21 bp, Artificial Sequence
  source: /note="Description of Artificial Sequence: Synthetic oligonucleotide"
agtactcgggaggatgtgttg

SEQ ID NO: 25431 - DNA, 21 bp, Artificial Sequence
  source: /note="Description of Artificial Sequence: Synthetic oligonucleotide"
agtactaggtttaattctact

SEQ ID NO: 25432 - DNA, 21 bp, Artificial Sequence
  source: /note="Description of Artificial Sequence: Synthetic oligonucleotide"
tcgacgcggcctacggttaat

SEQ ID NO: 25433 - DNA, 21 bp, Artificial Sequence
  source: /note="Description of Artificial Sequence: Synthetic oligonucleotide"
tctacgcgtcagttgcagcag

SEQ ID NO: 25434 - DNA, 21 bp, Artificial Sequence
  source: /note="Description of Artificial Sequence: Synthetic oligonucleotide"
tctactcggtctgatatgtat

SEQ ID NO: 25435 - DNA, 21 bp, Artificial Sequence
  source: /note="Description of Artificial Sequence: Synthetic oligonucleotide"
tcgacgcggtctattgctggt

SEQ ID NO: 25436 - DNA, 21 bp, Artificial Sequence
  source: /note="Description of Artificial Sequence: Synthetic oligonucleotide"
tcgactaggtcggtggagcat

SEQ ID NO: 25437 - DNA, 21 bp, Artificial Sequence
  source: /note="Description of Artificial Sequence: Synthetic oligonucleotide"
tcgactcgtacggtttctaat

SEQ ID NO: 25438 - DNA, 21 bp, Artificial Sequence
  source: /note="Description of Artificial Sequence: Synthetic oligonucleotide"
agtacgagggttttgactacg

SEQ ID NO: 25439 - DNA, 21 bp, Artificial Sequence
  source: /note="Description of Artificial Sequence: Synthetic oligonucleotide"
tctacgtctgcgaatctgggt

SEQ ID NO: 25440 - DNA, 21 bp, Artificial Sequence
  source: /note="Description of Artificial Sequence: Synthetic oligonucleotide"
tctacttctgatacgtggaag

SEQ ID NO: 25441 - DNA, 21 bp, Artificial Sequence
  source: /note="Description of Artificial Sequence: Synthetic oligonucleotide"
tcgacgtctgagggtcttaag

SEQ ID NO: 25442 - DNA, 21 bp, Artificial Sequence
  source: /note="Description of Artificial Sequence: Synthetic oligonucleotide"
tctactagtgagattgatcgt

SEQ ID NO: 25443 - DNA, 21 bp, Artificial Sequence
  source: /note="Description of Artificial Sequence: Synthetic oligonucleotide"
agtacttcgtttgcggtgggg

SEQ ID NO: 25444 - DNA, 21 bp, Artificial Sequence
  source: /note="Description of Artificial Sequence: Synthetic oligonucleotide"
tctacttctaaggcgcagtgt

SEQ ID NO: 25445 - DNA, 21 bp, Artificial Sequence
  source: /note="Description of Artificial Sequence: Synthetic oligonucleotide"
agtacgtctaaggctcagatt

SEQ ID NO: 25446 - DNA, 21 bp, Artificial Sequence
  source: /note="Description of Artificial Sequence: Synthetic oligonucleotide"
tctacttcgaagtatatgcat

SEQ ID NO: 25447 - DNA, 21 bp, Artificial Sequence
  source: /note="Description of Artificial Sequence: Synthetic oligonucleotide"
tctactagtcttgcggtgcag

SEQ ID NO: 25448 - DNA, 21 bp, Artificial Sequence
  source: /note="Description of Artificial Sequence: Synthetic oligonucleotide"
tcgacttcgttggggtatcag

SEQ ID NO: 25449 - DNA, 21 bp, Artificial Sequence
  source: /note="Description of Artificial Sequence: Synthetic oligonucleotide"
tcgacgtctcttccgtcgtgt

SEQ ID NO: 25450 - DNA, 21 bp, Artificial Sequence
  source: /note="Description of Artificial Sequence: Synthetic oligonucleotide"
tctacttctatgatgtcggcg

SEQ ID NO: 25451 - DNA, 21 bp, Artificial Sequence
  source: /note="Description of Artificial Sequence: Synthetic oligonucleotide"
tctacgtctatgtctcggact

SEQ ID NO: 25452 - DNA, 21 bp, Artificial Sequence
  source: /note="Description of Artificial Sequence: Synthetic oligonucleotide"
agtacgtcgcagccgttgcct

SEQ ID NO: 25453 - DNA, 21 bp, Artificial Sequence
  source: /note="Description of Artificial Sequence: Synthetic oligonucleotide"
tctactagtcgtaatatgagt

SEQ ID NO: 25454 - DNA, 21 bp, Artificial Sequence
  source: /note="Description of Artificial Sequence: Synthetic oligonucleotide"
tctacttcgtctctgtctgct

SEQ ID NO: 25455 - DNA, 21 bp, Artificial Sequence
  source: /note="Description of Artificial Sequence: Synthetic oligonucleotide"
tctacttcgagtcctcggcat

SEQ ID NO: 25456 - DNA, 21 bp, Artificial Sequence
  source: /note="Description of Artificial Sequence: Synthetic oligonucleotide"
agtacttctagttctctgtat

SEQ ID NO: 25457 - DNA, 21 bp, Artificial Sequence
  source: /note="Description of Artificial Sequence: Synthetic oligonucleotide"
tcgacgtcgtctacgctttcg

SEQ ID NO: 25458 - DNA, 21 bp, Artificial Sequence
  source: /note="Description of Artificial Sequence: Synthetic oligonucleotide"
tctacttctactggggctcct

SEQ ID NO: 25459 - DNA, 21 bp, Artificial Sequence
  source: /note="Description of Artificial Sequence: Synthetic oligonucleotide"
tcgacgtctactcttccgctt

SEQ ID NO: 25460 - DNA, 21 bp, Artificial Sequence
  source: /note="Description of Artificial Sequence: Synthetic oligonucleotide"
tcgacgtctactcttgtgcat

SEQ ID NO: 25461 - DNA, 21 bp, Artificial Sequence
  source: /note="Description of Artificial Sequence: Synthetic oligonucleotide"
agtactagtgtgccgcctaag

SEQ ID NO: 25462 - DNA, 21 bp, Artificial Sequence
  source: /note="Description of Artificial Sequence: Synthetic oligonucleotide"
tcgacttctgttcgtcagacg

SEQ ID NO: 25463 - DNA, 21 bp, Artificial Sequence
  source: /note="Description of Artificial Sequence: Synthetic oligonucleotide"
agtacgacggctaaggctatg

SEQ ID NO: 25464 - DNA, 21 bp, Artificial Sequence
  source: /note="Description of Artificial Sequence: Synthetic oligonucleotide"
tcgactactgcgcagactaag

SEQ ID NO: 25465 - DNA, 21 bp, Artificial Sequence
  source: /note="Description of Artificial Sequence: Synthetic oligonucleotide"
agtactactgctcggtcgcat

SEQ ID NO: 25466 - DNA, 21 bp, Artificial Sequence
  source: /note="Description of Artificial Sequence: Synthetic oligonucleotide"
tctactactgataagccttct

SEQ ID NO: 25467 - DNA, 21 bp, Artificial Sequence
  source: /note="Description of Artificial Sequence: Synthetic oligonucleotide"
tctacgactcatgatggtcgt

SEQ ID NO: 25468 - DNA, 21 bp, Artificial Sequence
  source: /note="Description of Artificial Sequence: Synthetic oligonucleotide"
agtacgactcatgggcgtgat

SEQ ID NO: 25469 - DNA, 21 bp, Artificial Sequence
  source: /note="Description of Artificial Sequence: Synthetic oligonucleotide"
agtactactttgcattatgtt

SEQ ID NO: 25470 - DNA, 21 bp, Artificial Sequence
  source: /note="Description of Artificial Sequence: Synthetic oligonucleotide"
tctacgactcttaagatgccg

SEQ ID NO: 25471 - DNA, 21 bp, Artificial Sequence
  source: /note="Description of Artificial Sequence: Synthetic oligonucleotide"
tctactactcttaatgggctg

SEQ ID NO: 25472 - DNA, 21 bp, Artificial Sequence
  source: /note="Description of Artificial Sequence: Synthetic oligonucleotide"
tcgacgacgctgacgccgctt

SEQ ID NO: 25473 - DNA, 21 bp, Artificial Sequence
  source: /note="Description of Artificial Sequence: Synthetic oligonucleotide"
tctactactaatatgttgctg

SEQ ID NO: 25474 - DNA, 21 bp, Artificial Sequence
  source: /note="Description of Artificial Sequence: Synthetic oligonucleotide"
agtacgacgccgtcgccgatg

SEQ ID NO: 25475 - DNA, 21 bp, Artificial Sequence
  source: /note="Description of Artificial Sequence: Synthetic oligonucleotide"
agtactacgaggtctcttctt

SEQ ID NO: 25476 - DNA, 21 bp, Artificial Sequence
  source: /note="Description of Artificial Sequence: Synthetic oligonucleotide"
tctactactcggacggggggg

SEQ ID NO: 25477 - DNA, 21 bp, Artificial Sequence
  source: /note="Description of Artificial Sequence: Synthetic oligonucleotide"
tctactacgaggactactctt

SEQ ID NO: 25478 - DNA, 21 bp, Artificial Sequence
  source: /note="Description of Artificial Sequence: Synthetic oligonucleotide"
agtactacttctccttctcgt

SEQ ID NO: 25479 - DNA, 21 bp, Artificial Sequence
  source: /note="Description of Artificial Sequence: Synthetic oligonucleotide"
tcgacgacgtctagggtggag

SEQ ID NO: 25480 - DNA, 21 bp, Artificial Sequence
  source: /note="Description of Artificial Sequence: Synthetic oligonucleotide"
tcgacgacttctactttgact

SEQ ID NO: 25481 - DNA, 21 bp, Artificial Sequence
  source: /note="Description of Artificial Sequence: Synthetic oligonucleotide"
tcgactactgttattactcct

SEQ ID NO: 25482 - DNA, 21 bp, Artificial Sequence
  source: /note="Description of Artificial Sequence: Synthetic oligonucleotide"
agtacggttattaagatgaat

SEQ ID NO: 25483 - DNA, 21 bp, Artificial Sequence
  source: /note="Description of Artificial Sequence: Synthetic oligonucleotide"
agtactgttattaatcctact

SEQ ID NO: 25484 - DNA, 21 bp, Artificial Sequence
  source: /note="Description of Artificial Sequence: Synthetic oligonucleotide"
agtacggttattcctactcct

SEQ ID NO: 25485 - DNA, 21 bp, Artificial Sequence
  source: /note="Description of Artificial Sequence: Synthetic oligonucleotide"
agtacggtgctgcttactgct

SEQ ID NO: 25486 - DNA, 21 bp, Artificial Sequence
  source: /note="Description of Artificial Sequence: Synthetic oligonucleotide"
tctactgttatgacgaaggtt

SEQ ID NO: 25487 - DNA, 21 bp, Artificial Sequence
  source: /note="Description of Artificial Sequence: Synthetic oligonucleotide"
agtacgtatatgacgcatagt

SEQ ID NO: 25488 - DNA, 21 bp, Artificial Sequence
  source: /note="Description of Artificial Sequence: Synthetic oligonucleotide"
tcgacgtataattcgccggag

SEQ ID NO: 25489 - DNA, 21 bp, Artificial Sequence
  source: /note="Description of Artificial Sequence: Synthetic oligonucleotide"
agtgtggcggctcatcagcat

SEQ ID NO: 25490 - DNA, 21 bp, Artificial Sequence
  source: /note="Description of Artificial Sequence: Synthetic oligonucleotide"
tcggtggctgctattaagccg

SEQ ID NO: 25491 - DNA, 21 bp, Artificial Sequence
  source: /note="Description of Artificial Sequence: Synthetic oligonucleotide"
tctgttgctgcggttagtttg

SEQ ID NO: 25492 - DNA, 21 bp, Artificial Sequence
  source: /note="Description of Artificial Sequence: Synthetic oligonucleotide"
tctgttgcgggtcttattaag

SEQ ID NO: 25493 - DNA, 21 bp, Artificial Sequence
  source: /note="Description of Artificial Sequence: Synthetic oligonucleotide"
agtgttgcgcataatcgtgct

SEQ ID NO: 25494 - DNA, 21 bp, Artificial Sequence
  source: /note="Description of Artificial Sequence: Synthetic oligonucleotide"
agtgttgcgcattatgggctt

SEQ ID NO: 25495 - DNA, 21 bp, Artificial Sequence
  source: /note="Description of Artificial Sequence: Synthetic oligonucleotide"
tctgtggctcctgctactctg

SEQ ID NO: 25496 - DNA, 21 bp, Artificial Sequence
  source: /note="Description of Artificial Sequence: Synthetic oligonucleotide"
tctgttgcgcctgttaaggcg

SEQ ID NO: 25497 - DNA, 21 bp, Artificial Sequence
  source: /note="Description of Artificial Sequence: Synthetic oligonucleotide"
tctgttgctaggaattctccg

SEQ ID NO: 25498 - DNA, 21 bp, Artificial Sequence
  source: /note="Description of Artificial Sequence: Synthetic oligonucleotide"
tcggttgcttcgatgtcgagt

SEQ ID NO: 25499 - DNA, 21 bp, Artificial Sequence
  source: /note="Description of Artificial Sequence: Synthetic oligonucleotide"
tcggttgctacggctcagacg

SEQ ID NO: 25500 - DNA, 21 bp, Artificial Sequence
  source: /note="Description of Artificial Sequence: Synthetic oligonucleotide"
tctgtggatgcggttactggt

SEQ ID NO: 25501 - DNA, 21 bp, Artificial Sequence
  source: /note="Description of Artificial Sequence: Synthetic oligonucleotide"
tcggttgatgagggtgcgcgt

SEQ ID NO: 25502 - DNA, 21 bp, Artificial Sequence
  source: /note="Description of Artificial Sequence: Synthetic oligonucleotide"
tcggttgatcctcataatccg

SEQ ID NO: 25503 - DNA, 21 bp, Artificial Sequence
  source: /note="Description of Artificial Sequence: Synthetic oligonucleotide"
agtgttgattcgtctattatt

SEQ ID NO: 25504 - DNA, 21 bp, Artificial Sequence
  source: /note="Description of Artificial Sequence: Synthetic oligonucleotide"
tcggtggatactggtcattcg

SEQ ID NO: 25505 - DNA, 21 bp, Artificial Sequence
  source: /note="Description of Artificial Sequence: Synthetic oligonucleotide"
agtgttgattatgtgggggtt

SEQ ID NO: 25506 - DNA, 21 bp, Artificial Sequence
  source: /note="Description of Artificial Sequence: Synthetic oligonucleotide"
tcggttgagttttctgatgcg

SEQ ID NO: 25507 - DNA, 21 bp, Artificial Sequence
  source: /note="Description of Artificial Sequence: Synthetic oligonucleotide"
tcggtggagaaggatgatcat

SEQ ID NO: 25508 - DNA, 21 bp, Artificial Sequence
  source: /note="Description of Artificial Sequence: Synthetic oligonucleotide"
agtgttgagactggtcgtgtg

SEQ ID NO: 25509 - DNA, 21 bp, Artificial Sequence
  source: /note="Description of Artificial Sequence: Synthetic oligonucleotide"
tctgtggagactactaattat

SEQ ID NO: 25510 - DNA, 21 bp, Artificial Sequence
  source: /note="Description of Artificial Sequence: Synthetic oligonucleotide"
tcggttgaggttagtcgtgct

SEQ ID NO: 25511 - DNA, 21 bp, Artificial Sequence
  source: /note="Description of Artificial Sequence: Synthetic oligonucleotide"
agtgtttttaagtgtgagccg

SEQ ID NO: 25512 - DNA, 21 bp, Artificial Sequence
  source: /note="Description of Artificial Sequence: Synthetic oligonucleotide"
tcggtgtttccgcattctgcg

SEQ ID NO: 25513 - DNA, 21 bp, Artificial Sequence
  source: /note="Description of Artificial Sequence: Synthetic oligonucleotide"
agtgtttttccgcttccgcat

SEQ ID NO: 25514 - DNA, 21 bp, Artificial Sequence
  source: /note="Description of Artificial Sequence: Synthetic oligonucleotide"
agtgttggtgataatggttcg

SEQ ID NO: 25515 - DNA, 21 bp, Artificial Sequence
  source: /note="Description of Artificial Sequence: Synthetic oligonucleotide"
tcggttgggcttcagcttgag

SEQ ID NO: 25516 - DNA, 21 bp, Artificial Sequence
  source: /note="Description of Artificial Sequence: Synthetic oligonucleotide"
agtgtgggtagtgctatggag

SEQ ID NO: 25517 - DNA, 21 bp, Artificial Sequence
  source: /note="Description of Artificial Sequence: Synthetic oligonucleotide"
tctgtggggagttatagtccg

SEQ ID NO: 25518 - DNA, 21 bp, Artificial Sequence
  source: /note="Description of Artificial Sequence: Synthetic oligonucleotide"
tcggtggggtcgtatgttgat

SEQ ID NO: 25519 - DNA, 21 bp, Artificial Sequence
  source: /note="Description of Artificial Sequence: Synthetic oligonucleotide"
tcggtggggacgaaggatgat

SEQ ID NO: 25520 - DNA, 21 bp, Artificial Sequence
  source: /note="Description of Artificial Sequence: Synthetic oligonucleotide"
agtgtgcatgatcatcgttct

SEQ ID NO: 25521 - DNA, 21 bp, Artificial Sequence
  source: /note="Description of Artificial Sequence: Synthetic oligonucleotide"
agtgtgcatgagcattctatg

SEQ ID NO: 25522 - DNA, 21 bp, Artificial Sequence
  source: /note="Description of Artificial Sequence: Synthetic oligonucleotide"
tcggttcatccgaatcaggct

SEQ ID NO: 25523 - DNA, 21 bp, Artificial Sequence
  source: /note="Description of Artificial Sequence: Synthetic oligonucleotide"
tctgtgattctgcgggcgact

SEQ ID NO: 25524 - DNA, 21 bp, Artificial Sequence
  source: /note="Description of Artificial Sequence: Synthetic oligonucleotide"
tctgtgattaatagtcgtggt

SEQ ID NO: 25525 - DNA, 21 bp, Artificial Sequence
  source: /note="Description of Artificial Sequence: Synthetic oligonucleotide"
agtgtgatttctcggtcggag

SEQ ID NO: 25526 - DNA, 21 bp, Artificial Sequence
  source: /note="Description of Artificial Sequence: Synthetic oligonucleotide"
agtgtgattacttgggaggat

SEQ ID NO: 25527 - DNA, 21 bp, Artificial Sequence
  source: /note="Description of Artificial Sequence: Synthetic oligonucleotide"
tctgtgaagcctctgaatcat

SEQ ID NO: 25528 - DNA, 21 bp, Artificial Sequence
  source: /note="Description of Artificial Sequence: Synthetic oligonucleotide"
tcggttaaggtgctgcggcct

SEQ ID NO: 25529 - DNA, 21 bp, Artificial Sequence
  source: /note="Description of Artificial Sequence: Synthetic oligonucleotide"
tctgtgttggatgggccgccg

SEQ ID NO: 25530 - DNA, 21 bp, Artificial Sequence
  source: /note="Description of Artificial Sequence: Synthetic oligonucleotide"
agtgttctgaatcttccgtcg

SEQ ID NO: 25531 - DNA, 21 bp, Artificial Sequence
  source: /note="Description of Artificial Sequence: Synthetic oligonucleotide"
tctgtgctgcctgagccttcg

SEQ ID NO: 25532 - DNA, 21 bp, Artificial Sequence
  source: /note="Description of Artificial Sequence: Synthetic oligonucleotide"
tcggttctgaggcatccgact

SEQ ID NO: 25533 - DNA, 21 bp, Artificial Sequence
  source: /note="Description of Artificial Sequence: Synthetic oligonucleotide"
tcggtgctgaggactactccg

SEQ ID NO: 25534 - DNA, 21 bp, Artificial Sequence
  source: /note="Description of Artificial Sequence: Synthetic oligonucleotide"
agtgttttgtctgctgttccg

SEQ ID NO: 25535 - DNA, 21 bp, Artificial Sequence
  source: /note="Description of Artificial Sequence: Synthetic oligonucleotide"
tcggtgctttctattgatcgg

SEQ ID NO: 25536 - DNA, 21 bp, Artificial Sequence
  source: /note="Description of Artificial Sequence: Synthetic oligonucleotide"
tcggttctgagttcgtctgtt

SEQ ID NO: 25537 - DNA, 21 bp, Artificial Sequence
  source: /note="Description of Artificial Sequence: Synthetic oligonucleotide"
tctgttatggctaatcaggct

SEQ ID NO: 25538 - DNA, 21 bp, Artificial Sequence
  source: /note="Description of Artificial Sequence: Synthetic oligonucleotide"
agtgttatgccgaagcctcag

SEQ ID NO: 25539 - DNA, 21 bp, Artificial Sequence
  source: /note="Description of Artificial Sequence: Synthetic oligonucleotide"
agtgttaatgcgacgcgtggg

SEQ ID NO: 25540 - DNA, 21 bp, Artificial Sequence
  source: /note="Description of Artificial Sequence: Synthetic oligonucleotide"
tctgtgaatggtaatgatgtg

SEQ ID NO: 25541 - DNA, 21 bp, Artificial Sequence
  source: /note="Description of Artificial Sequence: Synthetic oligonucleotide"
tcggtgaatgggagttggaag

SEQ ID NO: 25542 - DNA, 21 bp, Artificial Sequence
  source: /note="Description of Artificial Sequence: Synthetic oligonucleotide"
tctgtgccggagtataatggt

SEQ ID NO: 25543 - DNA, 21 bp, Artificial Sequence
  source: /note="Description of Artificial Sequence: Synthetic oligonucleotide"
tctgttccggggactgggtct

SEQ ID NO: 25544 - DNA, 21 bp, Artificial Sequence
  source: /note="Description of Artificial Sequence: Synthetic oligonucleotide"
tctgtgccgcatacgtctact

SEQ ID NO: 25545 - DNA, 21 bp, Artificial Sequence
  source: /note="Description of Artificial Sequence: Synthetic oligonucleotide"
agtgtgccgcagatgtatagt

SEQ ID NO: 25546 - DNA, 21 bp, Artificial Sequence
  source: /note="Description of Artificial Sequence: Synthetic oligonucleotide"
agtgtgcctagtgcgtcgaag

SEQ ID NO: 25547 - DNA, 21 bp, Artificial Sequence
  source: /note="Description of Artificial Sequence: Synthetic oligonucleotide"
agtgtgccgtcttctactcgg

SEQ ID NO: 25548 - DNA, 21 bp, Artificial Sequence
  source: /note="Description of Artificial Sequence: Synthetic oligonucleotide"
tctgttccggtgacgcctggg

SEQ ID NO: 25549 - DNA, 21 bp, Artificial Sequence
  source: /note="Description of Artificial Sequence: Synthetic oligonucleotide"
tctgttccttatgtggggacg

SEQ ID NO: 25550 - DNA, 21 bp, Artificial Sequence
  source: /note="Description of Artificial Sequence: Synthetic oligonucleotide"
tctgttcagagggaggagcgg

SEQ ID NO: 25551 - DNA, 21 bp, Artificial Sequence
  source: /note="Description of Artificial Sequence: Synthetic oligonucleotide"
tctgttcagcgtggggtggat

SEQ ID NO: 25552 - DNA, 21 bp, Artificial Sequence
  source: /note="Description of Artificial Sequence: Synthetic oligonucleotide"
tctgtgcagacgcgtccggag

SEQ ID NO: 25553 - DNA, 21 bp, Artificial Sequence
  source: /note="Description of Artificial Sequence: Synthetic oligonucleotide"
tcggtgcaggtgggttatcat

SEQ ID NO: 25554 - DNA, 21 bp, Artificial Sequence
  source: /note="Description of Artificial Sequence: Synthetic oligonucleotide"
agtgttcgtgcggagtctgcg

SEQ ID NO: 25555 - DNA, 21 bp, Artificial Sequence
  source: /note="Description of Artificial Sequence: Synthetic oligonucleotide"
agtgtgaggcatgttgagcct

SEQ ID NO: 25556 - DNA, 21 bp, Artificial Sequence
  source: /note="Description of Artificial Sequence: Synthetic oligonucleotide"
tcggttaggtcggcttctcag

SEQ ID NO: 25557 - DNA, 21 bp, Artificial Sequence
  source: /note="Description of Artificial Sequence: Synthetic oligonucleotide"
tcggtgcggagtctgtctccg

SEQ ID NO: 25558 - DNA, 21 bp, Artificial Sequence
  source: /note="Description of Artificial Sequence: Synthetic oligonucleotide"
agtgtgaggtcgaatcatgct

SEQ ID NO: 25559 - DNA, 21 bp, Artificial Sequence
  source: /note="Description of Artificial Sequence: Synthetic oligonucleotide"
tcggttcggactaaggattct

SEQ ID NO: 25560 - DNA, 21 bp, Artificial Sequence
  source: /note="Description of Artificial Sequence: Synthetic oligonucleotide"
tctgtttcttttagttcgtct

SEQ ID NO: 25561 - DNA, 21 bp, Artificial Sequence
  source: /note="Description of Artificial Sequence: Synthetic oligonucleotide"
agtgtttctggggcggctgcg

SEQ ID NO: 25562 - DNA, 21 bp, Artificial Sequence
  source: /note="Description of Artificial Sequence: Synthetic oligonucleotide"
tcggtgtctcataatgcgccg

SEQ ID NO: 25563 - DNA, 21 bp, Artificial Sequence
  source: /note="Description of Artificial Sequence: Synthetic oligonucleotide"
tctgtgtctaaggaggggacg

SEQ ID NO: 25564 - DNA, 21 bp, Artificial Sequence
  source: /note="Description of Artificial Sequence: Synthetic oligonucleotide"
tctgtttctttggctgatcct

SEQ ID NO: 25565 - DNA, 21 bp, Artificial Sequence
  source: /note="Description of Artificial Sequence: Synthetic oligonucleotide"
tcggttagtcttgagctgtat

SEQ ID NO: 25566 - DNA, 21 bp, Artificial Sequence
  source: /note="Description of Artificial Sequence: Synthetic oligonucleotide"
tctgtgagtcttggtcctaag

SEQ ID NO: 25567 - DNA, 21 bp, Artificial Sequence
  source: /note="Description of Artificial Sequence: Synthetic oligonucleotide"
tctgttagtccgcatcaggct

SEQ ID NO: 25568 - DNA, 21 bp, Artificial Sequence
  source: /note="Description of Artificial Sequence: Synthetic oligonucleotide"
tcggtgtctaggatggttgct

SEQ ID NO: 25569 - DNA, 21 bp, Artificial Sequence
  source: /note="Description of Artificial Sequence: Synthetic oligonucleotide"
tcggtttctcggcctgctctt

SEQ ID NO: 25570 - DNA, 21 bp, Artificial Sequence
  source: /note="Description of Artificial Sequence: Synthetic oligonucleotide"
tctgtttcgcgtcagcagatt

SEQ ID NO: 25571 - DNA, 21 bp, Artificial Sequence
  source: /note="Description of Artificial Sequence: Synthetic oligonucleotide"
tctgtttcgtctcagaatact

SEQ ID NO: 25572 - DNA, 21 bp, Artificial Sequence
  source: /note="Description of Artificial Sequence: Synthetic oligonucleotide"
tctgtgagttcgtcgcagctg

SEQ ID NO: 25573 - DNA, 21 bp, Artificial Sequence
  source: /note="Description of Artificial Sequence: Synthetic oligonucleotide"
tcggtttctactgctaatcct

SEQ ID NO: 25574 - DNA, 21 bp, Artificial Sequence
  source: /note="Description of Artificial Sequence: Synthetic oligonucleotide"
agtgttagtacgttgcctatg

SEQ ID NO: 25575 - DNA, 21 bp, Artificial Sequence
  source: /note="Description of Artificial Sequence: Synthetic oligonucleotide"
agtgtgtcgactaataagtat

SEQ ID NO: 25576 - DNA, 21 bp, Artificial Sequence
  source: /note="Description of Artificial Sequence: Synthetic oligonucleotide"
tctgttagtgttgattatatg

SEQ ID NO: 25577 - DNA, 21 bp, Artificial Sequence
  source: /note="Description of Artificial Sequence: Synthetic oligonucleotide"
tctgtgactgcgaagacgtat

SEQ ID NO: 25578 - DNA, 21 bp, Artificial Sequence
  source: /note="Description of Artificial Sequence: Synthetic oligonucleotide"
agtgttacggatggggtgctg

SEQ ID NO: 25579 - DNA, 21 bp, Artificial Sequence
  source: /note="Description of Artificial Sequence: Synthetic oligonucleotide"
agtgttacggagcatgttatt

SEQ ID NO: 25580 - DNA, 21 bp, Artificial Sequence
  source: /note="Description of Artificial Sequence: Synthetic oligonucleotide"
tcggttactggtgcgaatact

SEQ ID NO: 25581 - DNA, 21 bp, Artificial Sequence
  source: /note="Description of Artificial Sequence: Synthetic oligonucleotide"
tcggttactcatttgtttaag

SEQ ID NO: 25582 - DNA, 21 bp, Artificial Sequence
  source: /note="Description of Artificial Sequence: Synthetic oligonucleotide"
tcggttacgcctactcgtgct

SEQ ID NO: 25583 - DNA, 21 bp, Artificial Sequence
  source: /note="Description of Artificial Sequence: Synthetic oligonucleotide"
tctgttactcagatgtttaag

SEQ ID NO: 25584 - DNA, 21 bp, Artificial Sequence
  source: /note="Description of Artificial Sequence: Synthetic oligonucleotide"
tcggtgacgcgggctccgtat

SEQ ID NO: 25585 - DNA, 21 bp, Artificial Sequence
  source: /note="Description of Artificial Sequence: Synthetic oligonucleotide"
tctgtgactactagggctatt

SEQ ID NO: 25586 - DNA, 21 bp, Artificial Sequence
  source: /note="Description of Artificial Sequence: Synthetic oligonucleotide"
agtgtggttgctgcggttatt

SEQ ID NO: 25587 - DNA, 21 bp, Artificial Sequence
  source: /note="Description of Artificial Sequence: Synthetic oligonucleotide"
tctgtggttgggacgcatgcg

SEQ ID NO: 25588 - DNA, 21 bp, Artificial Sequence
  source: /note="Description of Artificial Sequence: Synthetic oligonucleotide"
agtgttgttcctcatgatctt

SEQ ID NO: 25589 - DNA, 21 bp, Artificial Sequence
  source: /note="Description of Artificial Sequence: Synthetic oligonucleotide"
tctgttgtgcggaaggaggct

SEQ ID NO: 25590 - DNA, 21 bp, Artificial Sequence
  source: /note="Description of Artificial Sequence: Synthetic oligonucleotide"
tctgtggtgtctaggcttggg

SEQ ID NO: 25591 - DNA, 21 bp, Artificial Sequence
  source: /note="Description of Artificial Sequence: Synthetic oligonucleotide"
tcggttgtgtcgtctcagggt

SEQ ID NO: 25592 - DNA, 21 bp, Artificial Sequence
  source: /note="Description of Artificial Sequence: Synthetic oligonucleotide"
tctgtttatacgcaggcgcct

SEQ ID NO: 25593 - DNA, 21 bp, Artificial Sequence
  source: /note="Description of Artificial Sequence: Synthetic oligonucleotide"
tcttgggatgcgagtgctctt

SEQ ID NO: 25594 - DNA, 21 bp, Artificial Sequence
  source: /note="Description of Artificial Sequence: Synthetic oligonucleotide"
tcttggggtgcgaaggagggt

SEQ ID NO: 25595 - DNA, 21 bp, Artificial Sequence
  source: /note="Description of Artificial Sequence: Synthetic oligonucleotide"
agttggggtgagacggctaag

SEQ ID NO: 25596 - DNA, 21 bp, Artificial Sequence
  source: /note="Description of Artificial Sequence: Synthetic oligonucleotide"
tcttggcataatagtcagcct

SEQ ID NO: 25597 - DNA, 21 bp, Artificial Sequence
  source: /note="Description of Artificial Sequence: Synthetic oligonucleotide"
agttggccgtcgaatggtgtt

SEQ ID NO: 25598 - DNA, 21 bp, Artificial Sequence
  source: /note="Description of Artificial Sequence: Synthetic oligonucleotide"
tcttggcagacttcgattgcg

SEQ ID NO: 25599 - DNA, 21 bp, Artificial Sequence
  source: /note="Description of Artificial Sequence: Synthetic oligonucleotide"
tcttggcgtgatgttccgccg

SEQ ID NO: 25600 - DNA, 21 bp, Artificial Sequence
  source: /note="Description of Artificial Sequence: Synthetic oligonucleotide"
tcgtggtcgcatgagcaggag

SEQ ID NO: 25601 - DNA, 21 bp, Artificial Sequence
  source: /note="Description of Artificial Sequence: Synthetic oligonucleotide"
tcgtatgctaagagtctggat

SEQ ID NO: 25602 - DNA, 21 bp, Artificial Sequence
  source: /note="Description of Artificial Sequence: Synthetic oligonucleotide"
tcgtatgctaggacgtctttg

SEQ ID NO: 25603 - DNA, 21 bp, Artificial Sequence
  source: /note="Description of Artificial Sequence: Synthetic oligonucleotide"
tcgtatgcttctctgactcct

SEQ ID NO: 25604 - DNA, 21 bp, Artificial Sequence
  source: /note="Description of Artificial Sequence: Synthetic oligonucleotide"
agttatgcttctcggactgtt

SEQ ID NO: 25605 - DNA, 21 bp, Artificial Sequence
  source: /note="Description of Artificial Sequence: Synthetic oligonucleotide"
agttatgctacgtctttgact

SEQ ID NO: 25606 - DNA, 21 bp, Artificial Sequence
  source: /note="Description of Artificial Sequence: Synthetic oligonucleotide"
tcttatgatcgttcgcctgcg

SEQ ID NO: 25607 - DNA, 21 bp, Artificial Sequence
  source: /note="Description of Artificial Sequence: Synthetic oligonucleotide"
tcttatgaggcttcgaagtat

SEQ ID NO: 25608 - DNA, 21 bp, Artificial Sequence
  source: /note="Description of Artificial Sequence: Synthetic oligonucleotide"
tcgtatgaggatgatagttgt

SEQ ID NO: 25609 - DNA, 21 bp, Artificial Sequence
  source: /note="Description of Artificial Sequence: Synthetic oligonucleotide"
tcgtatgagccgaataagctg

SEQ ID NO: 25610 - DNA, 21 bp, Artificial Sequence
  source: /note="Description of Artificial Sequence: Synthetic oligonucleotide"
tcgtatgggggtactcttctt

SEQ ID NO: 25611 - DNA, 21 bp, Artificial Sequence
  source: /note="Description of Artificial Sequence: Synthetic oligonucleotide"
tcgtatgggaaggagtatgtg

SEQ ID NO: 25612 - DNA, 21 bp, Artificial Sequence
  source: /note="Description of Artificial Sequence: Synthetic oligonucleotide"
tcgtatggtcttccggcgtat

SEQ ID NO: 25613 - DNA, 21 bp, Artificial Sequence
  source: /note="Description of Artificial Sequence: Synthetic oligonucleotide"
tcttatggtcctattaagact

SEQ ID NO: 25614 - DNA, 21 bp, Artificial Sequence
  source: /note="Description of Artificial Sequence: Synthetic oligonucleotide"
tcgtatgggcgtggggctgag

SEQ ID NO: 25615 - DNA, 21 bp, Artificial Sequence
  source: /note="Description of Artificial Sequence: Synthetic oligonucleotide"
agttatgggtctggtcagatt

SEQ ID NO: 25616 - DNA, 21 bp, Artificial Sequence
  source: /note="Description of Artificial Sequence: Synthetic oligonucleotide"
tcttatgggtcgaagcttcct

SEQ ID NO: 25617 - DNA, 21 bp, Artificial Sequence
  source: /note="Description of Artificial Sequence: Synthetic oligonucleotide"
tcgtatgggactgcgccgatt

SEQ ID NO: 25618 - DNA, 21 bp, Artificial Sequence
  source: /note="Description of Artificial Sequence: Synthetic oligonucleotide"
tcgtatggggttccgcgtccg

SEQ ID NO: 25619 - DNA, 21 bp, Artificial Sequence
  source: /note="Description of Artificial Sequence: Synthetic oligonucleotide"
tcgtatcatccgaagttgaat

SEQ ID NO: 25620 - DNA, 21 bp, Artificial Sequence
  source: /note="Description of Artificial Sequence: Synthetic oligonucleotide"
agttatattccgtctacgatt

SEQ ID NO: 25621 - DNA, 21 bp, Artificial Sequence
  source: /note="Description of Artificial Sequence: Synthetic oligonucleotide"
tcgtatattcgggaggatcct

SEQ ID NO: 25622 - DNA, 21 bp, Artificial Sequence
  source: /note="Description of Artificial Sequence: Synthetic oligonucleotide"
tcgtataaggggtcgtatatg

SEQ ID NO: 25623 - DNA, 21 bp, Artificial Sequence
  source: /note="Description of Artificial Sequence: Synthetic oligonucleotide"
tcttataagcatatgccgcct

SEQ ID NO: 25624 - DNA, 21 bp, Artificial Sequence
  source: /note="Description of Artificial Sequence: Synthetic oligonucleotide"
agttataagtcgcagattgcg

SEQ ID NO: 25625 - DNA, 21 bp, Artificial Sequence
  source: /note="Description of Artificial Sequence: Synthetic oligonucleotide"
tcgtatttggggattgcgcct

SEQ ID NO: 25626 - DNA, 21 bp, Artificial Sequence
  source: /note="Description of Artificial Sequence: Synthetic oligonucleotide"
tcttatctgaatcctatgaat

SEQ ID NO: 25627 - DNA, 21 bp, Artificial Sequence
  source: /note="Description of Artificial Sequence: Synthetic oligonucleotide"
tcttatcttcctccggcgccg

SEQ ID NO: 25628 - DNA, 21 bp, Artificial Sequence
  source: /note="Description of Artificial Sequence: Synthetic oligonucleotide"
tcgtatatggcgtcgttgcct

SEQ ID NO: 25629 - DNA, 21 bp, Artificial Sequence
  source: /note="Description of Artificial Sequence: Synthetic oligonucleotide"
tcgtatatgccgcagacggtg

SEQ ID NO: 25630 - DNA, 21 bp, Artificial Sequence
  source: /note="Description of Artificial Sequence: Synthetic oligonucleotide"
agttatatgtctccggtttct

SEQ ID NO: 25631 - DNA, 21 bp, Artificial Sequence
  source: /note="Description of Artificial Sequence: Synthetic oligonucleotide"
agttatatgacgaaggatttg

SEQ ID NO: 25632 - DNA, 21 bp, Artificial Sequence
  source: /note="Description of Artificial Sequence: Synthetic oligonucleotide"
agttatccggcgaagcctagt

SEQ ID NO: 25633 - DNA, 21 bp, Artificial Sequence
  source: /note="Description of Artificial Sequence: Synthetic oligonucleotide"
tcttatcctgcttcgtctcgt

SEQ ID NO: 25634 - DNA, 21 bp, Artificial Sequence
  source: /note="Description of Artificial Sequence: Synthetic oligonucleotide"
agttatcctaagtcgtatgag

SEQ ID NO: 25635 - DNA, 21 bp, Artificial Sequence
  source: /note="Description of Artificial Sequence: Synthetic oligonucleotide"
tcgtatcctgttagtgttccg

SEQ ID NO: 25636 - DNA, 21 bp, Artificial Sequence
  source: /note="Description of Artificial Sequence: Synthetic oligonucleotide"
tcttatcaggcgattagtacg

SEQ ID NO: 25637 - DNA, 21 bp, Artificial Sequence
  source: /note="Description of Artificial Sequence: Synthetic oligonucleotide"
agttatcgtcctgagagtggt

SEQ ID NO: 25638 - DNA, 21 bp, Artificial Sequence
  source: /note="Description of Artificial Sequence: Synthetic oligonucleotide"
tcttataggcctgagacgaat

SEQ ID NO: 25639 - DNA, 21 bp, Artificial Sequence
  source: /note="Description of Artificial Sequence: Synthetic oligonucleotide"
agttatcgggtgaatacgggg

SEQ ID NO: 25640 - DNA, 21 bp, Artificial Sequence
  source: /note="Description of Artificial Sequence: Synthetic oligonucleotide"
tcgtattcggcttcggagttt

SEQ ID NO: 25641 - DNA, 21 bp, Artificial Sequence
  source: /note="Description of Artificial Sequence: Synthetic oligonucleotide"
agttattctgcgacgacggtt

SEQ ID NO: 25642 - DNA, 21 bp, Artificial Sequence
  source: /note="Description of Artificial Sequence: Synthetic oligonucleotide"
tcttattctggggggtgtttg

SEQ ID NO: 25643 - DNA, 21 bp, Artificial Sequence
  source: /note="Description of Artificial Sequence: Synthetic oligonucleotide"
tcgtattcgcatcttagtggg

SEQ ID NO: 25644 - DNA, 21 bp, Artificial Sequence
  source: /note="Description of Artificial Sequence: Synthetic oligonucleotide"
tcgtattctatggcgcatccg

SEQ ID NO: 25645 - DNA, 21 bp, Artificial Sequence
  source: /note="Description of Artificial Sequence: Synthetic oligonucleotide"
tcttatagtagtgatcgttcg

SEQ ID NO: 25646 - DNA, 21 bp, Artificial Sequence
  source: /note="Description of Artificial Sequence: Synthetic oligonucleotide"
tcttatactgatgctgcgttg

SEQ ID NO: 25647 - DNA, 21 bp, Artificial Sequence
  source: /note="Description of Artificial Sequence: Synthetic oligonucleotide"
tcgtatactcatgtgtctggt

SEQ ID NO: 25648 - DNA, 21 bp, Artificial Sequence
  source: /note="Description of Artificial Sequence: Synthetic oligonucleotide"
tcttatactaaggatgttgat

SEQ ID NO: 25649 - DNA, 21 bp, Artificial Sequence
  source: /note="Description of Artificial Sequence: Synthetic oligonucleotide"
tcgtatacgaagtcggcgccg

SEQ ID NO: 25650 - DNA, 21 bp, Artificial Sequence
  source: /note="Description of Artificial Sequence: Synthetic oligonucleotide"
agttatacgtctccttcgtcg

SEQ ID NO: 25651 - DNA, 21 bp, Artificial Sequence
  source: /note="Description of Artificial Sequence: Synthetic oligonucleotide"
agttatacggttgattctcat

SEQ ID NO: 25652 - DNA, 21 bp, Artificial Sequence
  source: /note="Description of Artificial Sequence: Synthetic oligonucleotide"
tcgtatgtgaagcctgcggag

SEQ ID NO: 25653 - DNA, 21 bp, Artificial Sequence
  source: /note="Description of Artificial Sequence: Synthetic oligonucleotide"
tcttatgtgaataatccgggt

SEQ ID NO: 25654 - DNA, 21 bp, Artificial Sequence
  source: /note="Description of Artificial Sequence: Synthetic oligonucleotide"
tcgtatgtgcgtccgacttct

SEQ ID NO: 25655 - DNA, 21 bp, Artificial Sequence
  source: /note="Description of Artificial Sequence: Synthetic oligonucleotide"
agttatgtgagtggggcggcg

SEQ ID NO: 25656 - DNA, 21 bp, Artificial Sequence
  source: /note="Description of Artificial Sequence: Synthetic oligonucleotide"
acggcggcggcggatcgtgtt

SEQ ID NO: 25657 - DNA, 21 bp, Artificial Sequence
  source: /note="Description of Artificial Sequence: Synthetic oligonucleotide"
actgctgctgcgtctaatagg

SEQ ID NO: 25658 - DNA, 21 bp, Artificial Sequence
  source: /note="Description of Artificial Sequence: Synthetic oligonucleotide"
acggctgctgcttcggttcgt

SEQ ID NO: 25659 - DNA, 21 bp, Artificial Sequence
  source: /note="Description of Artificial Sequence: Synthetic oligonucleotide"
actgctgcggataatgatgag

SEQ ID NO: 25660 - DNA, 21 bp, Artificial Sequence
  source: /note="Description of Artificial Sequence: Synthetic oligonucleotide"
acggcggcttttgatcgtgtg

SEQ ID NO: 25661 - DNA, 21 bp, Artificial Sequence
  source: /note="Description of Artificial Sequence: Synthetic oligonucleotide"
acggcggcgcatcttggtaat

SEQ ID NO: 25662 - DNA, 21 bp, Artificial Sequence
  source: /note="Description of Artificial Sequence: Synthetic oligonucleotide"
acggctgctaagagtgctggg

SEQ ID NO: 25663 - DNA, 21 bp, Artificial Sequence
  source: /note="Description of Artificial Sequence: Synthetic oligonucleotide"
actgcggctctgactgggcat

SEQ ID NO: 25664 - DNA, 21 bp, Artificial Sequence
  source: /note="Description of Artificial Sequence: Synthetic oligonucleotide"
actgcggcgaggtttgctgcg

SEQ ID NO: 25665 - DNA, 21 bp, Artificial Sequence
  source: /note="Description of Artificial Sequence: Synthetic oligonucleotide"
acggctgctcggagttcggat

SEQ ID NO: 25666 - DNA, 21 bp, Artificial Sequence
  source: /note="Description of Artificial Sequence: Synthetic oligonucleotide"
acggctgcgtcgcattcgact

SEQ ID NO: 25667 - DNA, 21 bp, Artificial Sequence
  source: /note="Description of Artificial Sequence: Synthetic oligonucleotide"
actgctgctactaatgttaat

SEQ ID NO: 25668 - DNA, 21 bp, Artificial Sequence
  source: /note="Description of Artificial Sequence: Synthetic oligonucleotide"
actgctgcggttactaatacg

SEQ ID NO: 25669 - DNA, 21 bp, Artificial Sequence
  source: /note="Description of Artificial Sequence: Synthetic oligonucleotide"
actgcggatcggatgatgtcg

SEQ ID NO: 25670 - DNA, 21 bp, Artificial Sequence
  source: /note="Description of Artificial Sequence: Synthetic oligonucleotide"
actgcggagcatacgcggttt

SEQ ID NO: 25671 - DNA, 21 bp, Artificial Sequence
  source: /note="Description of Artificial Sequence: Synthetic oligonucleotide"
acggcggagaatctgtctcct

SEQ ID NO: 25672 - DNA, 21 bp, Artificial Sequence
  source: /note="Description of Artificial Sequence: Synthetic oligonucleotide"
actgcggagcctgttcggacg

SEQ ID NO: 25673 - DNA, 21 bp, Artificial Sequence
  source: /note="Description of Artificial Sequence: Synthetic oligonucleotide"
actgcttttcagacgattgag

SEQ ID NO: 25674 - DNA, 21 bp, Artificial Sequence
  source: /note="Description of Artificial Sequence: Synthetic oligonucleotide"
actgcttttcggatggattat

SEQ ID NO: 25675 - DNA, 21 bp, Artificial Sequence
  source: /note="Description of Artificial Sequence: Synthetic oligonucleotide"
actgcgggggggcagccgctt

SEQ ID NO: 25676 - DNA, 21 bp, Artificial Sequence
  source: /note="Description of Artificial Sequence: Synthetic oligonucleotide"
actgcggggggtacgactcct

SEQ ID NO: 25677 - DNA, 21 bp, Artificial Sequence
  source: /note="Description of Artificial Sequence: Synthetic oligonucleotide"
actgctgggcttggggtgccg

SEQ ID NO: 25678 - DNA, 21 bp, Artificial Sequence
  source: /note="Description of Artificial Sequence: Synthetic oligonucleotide"
acggcgggtaatttgattccg

SEQ ID NO: 25679 - DNA, 21 bp, Artificial Sequence
  source: /note="Description of Artificial Sequence: Synthetic oligonucleotide"
actgcggggccgcatcgtgtt

SEQ ID NO: 25680 - DNA, 21 bp, Artificial Sequence
  source: /note="Description of Artificial Sequence: Synthetic oligonucleotide"
acggcgggtgttccggcgatt

SEQ ID NO: 25681 - DNA, 21 bp, Artificial Sequence
  source: /note="Description of Artificial Sequence: Synthetic oligonucleotide"
acggctcatgaggagaggaat

SEQ ID NO: 25682 - DNA, 21 bp, Artificial Sequence
  source: /note="Description of Artificial Sequence: Synthetic oligonucleotide"
actgcgcattttagtgcgact

SEQ ID NO: 25683 - DNA, 21 bp, Artificial Sequence
  source: /note="Description of Artificial Sequence: Synthetic oligonucleotide"
actgctcatccgtttcctcct

SEQ ID NO: 25684 - DNA, 21 bp, Artificial Sequence
  source: /note="Description of Artificial Sequence: Synthetic oligonucleotide"
actgctcatcagttgattgct

SEQ ID NO: 25685 - DNA, 21 bp, Artificial Sequence
  source: /note="Description of Artificial Sequence: Synthetic oligonucleotide"
acggctcattctttgcagtcg

SEQ ID NO: 25686 - DNA, 21 bp, Artificial Sequence
  source: /note="Description of Artificial Sequence: Synthetic oligonucleotide"
acggctcattcttatgctcat

SEQ ID NO: 25687 - DNA, 21 bp, Artificial Sequence
  source: /note="Description of Artificial Sequence: Synthetic oligonucleotide"
acggctcatgtgtttcctgct

SEQ ID NO: 25688 - DNA, 21 bp, Artificial Sequence
  source: /note="Description of Artificial Sequence: Synthetic oligonucleotide"
actgctattgggattagtccg

SEQ ID NO: 25689 - DNA, 21 bp, Artificial Sequence
  source: /note="Description of Artificial Sequence: Synthetic oligonucleotide"
acggctattccttttcctgcg

SEQ ID NO: 25690 - DNA, 21 bp, Artificial Sequence
  source: /note="Description of Artificial Sequence: Synthetic oligonucleotide"
actgctattagttctcgggct

SEQ ID NO: 25691 - DNA, 21 bp, Artificial Sequence
  source: /note="Description of Artificial Sequence: Synthetic oligonucleotide"
actgctaaggctacggttgag

SEQ ID NO: 25692 - DNA, 21 bp, Artificial Sequence
  source: /note="Description of Artificial Sequence: Synthetic oligonucleotide"
actgcgaagtcttcgaataat

SEQ ID NO: 25693 - DNA, 21 bp, Artificial Sequence
  source: /note="Description of Artificial Sequence: Synthetic oligonucleotide"
actgcgaagactagtgcgatt

SEQ ID NO: 25694 - DNA, 21 bp, Artificial Sequence
  source: /note="Description of Artificial Sequence: Synthetic oligonucleotide"
actgcgaagtatgatcatctg

SEQ ID NO: 25695 - DNA, 21 bp, Artificial Sequence
  source: /note="Description of Artificial Sequence: Synthetic oligonucleotide"
actgcgctttttcaggatgct

SEQ ID NO: 25696 - DNA, 21 bp, Artificial Sequence
  source: /note="Description of Artificial Sequence: Synthetic oligonucleotide"
acggcgttgcatgcggatgtg

SEQ ID NO: 25697 - DNA, 21 bp, Artificial Sequence
  source: /note="Description of Artificial Sequence: Synthetic oligonucleotide"
acggctttgcattatagtgag

SEQ ID NO: 25698 - DNA, 21 bp, Artificial Sequence
  source: /note="Description of Artificial Sequence: Synthetic oligonucleotide"
acggcgatgccgatgaagatt

SEQ ID NO: 25699 - DNA, 21 bp, Artificial Sequence
  source: /note="Description of Artificial Sequence: Synthetic oligonucleotide"
acggcgatgcagatgactccg

SEQ ID NO: 25700 - DNA, 21 bp, Artificial Sequence
  source: /note="Description of Artificial Sequence: Synthetic oligonucleotide"
actgctatgcagacggctatg

SEQ ID NO: 25701 - DNA, 21 bp, Artificial Sequence
  source: /note="Description of Artificial Sequence: Synthetic oligonucleotide"
actgctatgacgactatgggg

SEQ ID NO: 25702 - DNA, 21 bp, Artificial Sequence
  source: /note="Description of Artificial Sequence: Synthetic oligonucleotide"
acggctaatccgcttagtacg

SEQ ID NO: 25703 - DNA, 21 bp, Artificial Sequence
  source: /note="Description of Artificial Sequence: Synthetic oligonucleotide"
actgcgaatgtgcctgctcgt

SEQ ID NO: 25704 - DNA, 21 bp, Artificial Sequence
  source: /note="Description of Artificial Sequence: Synthetic oligonucleotide"
acggctaatgtgcgttcgatg

SEQ ID NO: 25705 - DNA, 21 bp, Artificial Sequence
  source: /note="Description of Artificial Sequence: Synthetic oligonucleotide"
acggctcctgagaggactaat

SEQ ID NO: 25706 - DNA, 21 bp, Artificial Sequence
  source: /note="Description of Artificial Sequence: Synthetic oligonucleotide"
acggctcctggtcatgcgtcg

SEQ ID NO: 25707 - DNA, 21 bp, Artificial Sequence
  source: /note="Description of Artificial Sequence: Synthetic oligonucleotide"
acggctcctcctacggatcgt

SEQ ID NO: 25708 - DNA, 21 bp, Artificial Sequence
  source: /note="Description of Artificial Sequence: Synthetic oligonucleotide"
acggctcctaggagttctgag

SEQ ID NO: 25709 - DNA, 21 bp, Artificial Sequence
  source: /note="Description of Artificial Sequence: Synthetic oligonucleotide"
acggctcctagtcggatgggt

SEQ ID NO: 25710 - DNA, 21 bp, Artificial Sequence
  source: /note="Description of Artificial Sequence: Synthetic oligonucleotide"
acggctcctactggtactatt

SEQ ID NO: 25711 - DNA, 21 bp, Artificial Sequence
  source: /note="Description of Artificial Sequence: Synthetic oligonucleotide"
actgctccgtatggggatgct

SEQ ID NO: 25712 - DNA, 21 bp, Artificial Sequence
  source: /note="Description of Artificial Sequence: Synthetic oligonucleotide"
actgcgcaggaggggcggact

SEQ ID NO: 25713 - DNA, 21 bp, Artificial Sequence
  source: /note="Description of Artificial Sequence: Synthetic oligonucleotide"
actgcgcagttgactgctcat

SEQ ID NO: 25714 - DNA, 21 bp, Artificial Sequence
  source: /note="Description of Artificial Sequence: Synthetic oligonucleotide"
actgctcagctgacttcttct

SEQ ID NO: 25715 - DNA, 21 bp, Artificial Sequence
  source: /note="Description of Artificial Sequence: Synthetic oligonucleotide"
actgctcagcggggtccggct

SEQ ID NO: 25716 - DNA, 21 bp, Artificial Sequence
  source: /note="Description of Artificial Sequence: Synthetic oligonucleotide"
acggcgcgggattctagtccg

SEQ ID NO: 25717 - DNA, 21 bp, Artificial Sequence
  source: /note="Description of Artificial Sequence: Synthetic oligonucleotide"
actgcgcgtggtcttgttcct

SEQ ID NO: 25718 - DNA, 21 bp, Artificial Sequence
  source: /note="Description of Artificial Sequence: Synthetic oligonucleotide"
actgctcgtggtaatatgctg

SEQ ID NO: 25719 - DNA, 21 bp, Artificial Sequence
  source: /note="Description of Artificial Sequence: Synthetic oligonucleotide"
actgctcgtgggtctccgttg

SEQ ID NO: 25720 - DNA, 21 bp, Artificial Sequence
  source: /note="Description of Artificial Sequence: Synthetic oligonucleotide"
acggcgcggccgcctggggtg

SEQ ID NO: 25721 - DNA, 21 bp, Artificial Sequence
  source: /note="Description of Artificial Sequence: Synthetic oligonucleotide"
actgctcggtcttctgtgacg

SEQ ID NO: 25722 - DNA, 21 bp, Artificial Sequence
  source: /note="Description of Artificial Sequence: Synthetic oligonucleotide"
actgcgcgtacgttgattagt

SEQ ID NO: 25723 - DNA, 21 bp, Artificial Sequence
  source: /note="Description of Artificial Sequence: Synthetic oligonucleotide"
actgcgtctgctgcgaggacg

SEQ ID NO: 25724 - DNA, 21 bp, Artificial Sequence
  source: /note="Description of Artificial Sequence: Synthetic oligonucleotide"
actgcttctgcgacttatccg

SEQ ID NO: 25725 - DNA, 21 bp, Artificial Sequence
  source: /note="Description of Artificial Sequence: Synthetic oligonucleotide"
actgcttcgttttcttctacg

SEQ ID NO: 25726 - DNA, 21 bp, Artificial Sequence
  source: /note="Description of Artificial Sequence: Synthetic oligonucleotide"
acggcgagtggtagtgagcgg

SEQ ID NO: 25727 - DNA, 21 bp, Artificial Sequence
  source: /note="Description of Artificial Sequence: Synthetic oligonucleotide"
acggcttcgaagaatgattat

SEQ ID NO: 25728 - DNA, 21 bp, Artificial Sequence
  source: /note="Description of Artificial Sequence: Synthetic oligonucleotide"
acggcgtctatgggggagcgt

SEQ ID NO: 25729 - DNA, 21 bp, Artificial Sequence
  source: /note="Description of Artificial Sequence: Synthetic oligonucleotide"
acggcgtcgtcgatggggaag

SEQ ID NO: 25730 - DNA, 21 bp, Artificial Sequence
  source: /note="Description of Artificial Sequence: Synthetic oligonucleotide"
actgcgagtacggtgaagatg

SEQ ID NO: 25731 - DNA, 21 bp, Artificial Sequence
  source: /note="Description of Artificial Sequence: Synthetic oligonucleotide"
actgcttcggttcctatgaag

SEQ ID NO: 25732 - DNA, 21 bp, Artificial Sequence
  source: /note="Description of Artificial Sequence: Synthetic oligonucleotide"
acggcttcgtatagtcctaag

SEQ ID NO: 25733 - DNA, 21 bp, Artificial Sequence
  source: /note="Description of Artificial Sequence: Synthetic oligonucleotide"
acggctactccgcatattggg

SEQ ID NO: 25734 - DNA, 21 bp, Artificial Sequence
  source: /note="Description of Artificial Sequence: Synthetic oligonucleotide"
acggctactcggaatgaggtg

SEQ ID NO: 25735 - DNA, 21 bp, Artificial Sequence
  source: /note="Description of Artificial Sequence: Synthetic oligonucleotide"
actgcgactcggactggtcct

SEQ ID NO: 25736 - DNA, 21 bp, Artificial Sequence
  source: /note="Description of Artificial Sequence: Synthetic oligonucleotide"
actgctacttatcctaatgat

SEQ ID NO: 25737 - DNA, 21 bp, Artificial Sequence
  source: /note="Description of Artificial Sequence: Synthetic oligonucleotide"
actgctgttgctcatcctgcg

SEQ ID NO: 25738 - DNA, 21 bp, Artificial Sequence
  source: /note="Description of Artificial Sequence: Synthetic oligonucleotide"
actgcggtgccggagtggact

SEQ ID NO: 25739 - DNA, 21 bp, Artificial Sequence
  source: /note="Description of Artificial Sequence: Synthetic oligonucleotide"
actgctgttcaggagcatact

SEQ ID NO: 25740 - DNA, 21 bp, Artificial Sequence
  source: /note="Description of Artificial Sequence: Synthetic oligonucleotide"
actgctgttcgttcgatttcg

SEQ ID NO: 25741 - DNA, 21 bp, Artificial Sequence
  source: /note="Description of Artificial Sequence: Synthetic oligonucleotide"
actgctgtggttaagtttccg

SEQ ID NO: 25742 - DNA, 21 bp, Artificial Sequence
  source: /note="Description of Artificial Sequence: Synthetic oligonucleotide"
acggcggtgtatgcgacggcg

SEQ ID NO: 25743 - DNA, 21 bp, Artificial Sequence
  source: /note="Description of Artificial Sequence: Synthetic oligonucleotide"
acggctgtgtattctaagggg

SEQ ID NO: 25744 - DNA, 21 bp, Artificial Sequence
  source: /note="Description of Artificial Sequence: Synthetic oligonucleotide"
actgcgtgggatcctgagtcg

SEQ ID NO: 25745 - DNA, 21 bp, Artificial Sequence
  source: /note="Description of Artificial Sequence: Synthetic oligonucleotide"
acggcttattgtcagcagtat

SEQ ID NO: 25746 - DNA, 21 bp, Artificial Sequence
  source: /note="Description of Artificial Sequence: Synthetic oligonucleotide"
acggcgtatccttttgaggcg

SEQ ID NO: 25747 - DNA, 21 bp, Artificial Sequence
  source: /note="Description of Artificial Sequence: Synthetic oligonucleotide"
acggcgtatcctcatcagatt

SEQ ID NO: 25748 - DNA, 21 bp, Artificial Sequence
  source: /note="Description of Artificial Sequence: Synthetic oligonucleotide"
acggatgctgatcggtctcct

SEQ ID NO: 25749 - DNA, 21 bp, Artificial Sequence
  source: /note="Description of Artificial Sequence: Synthetic oligonucleotide"
acggattgtcgtcaggggggt

SEQ ID NO: 25750 - DNA, 21 bp, Artificial Sequence
  source: /note="Description of Artificial Sequence: Synthetic oligonucleotide"
actgatgatattaagaatgat

SEQ ID NO: 25751 - DNA, 21 bp, Artificial Sequence
  source: /note="Description of Artificial Sequence: Synthetic oligonucleotide"
actgatgagtataagaaggct

SEQ ID NO: 25752 - DNA, 21 bp, Artificial Sequence
  source: /note="Description of Artificial Sequence: Synthetic oligonucleotide"
actgattttcgtaggattcct

SEQ ID NO: 25753 - DNA, 21 bp, Artificial Sequence
  source: /note="Description of Artificial Sequence: Synthetic oligonucleotide"
acggatgggttgcataagttg

SEQ ID NO: 25754 - DNA, 21 bp, Artificial Sequence
  source: /note="Description of Artificial Sequence: Synthetic oligonucleotide"
acggatgggcctggtctgacg

SEQ ID NO: 25755 - DNA, 21 bp, Artificial Sequence
  source: /note="Description of Artificial Sequence: Synthetic oligonucleotide"
acggatggtcggttggggggt

SEQ ID NO: 25756 - DNA, 21 bp, Artificial Sequence
  source: /note="Description of Artificial Sequence: Synthetic oligonucleotide"
acggatgggtctagggtgcct

SEQ ID NO: 25757 - DNA, 21 bp, Artificial Sequence
  source: /note="Description of Artificial Sequence: Synthetic oligonucleotide"
acggatcatgtgcatcgtggg

SEQ ID NO: 25758 - DNA, 21 bp, Artificial Sequence
  source: /note="Description of Artificial Sequence: Synthetic oligonucleotide"
acggataagcatggtgtgctg

SEQ ID NO: 25759 - DNA, 21 bp, Artificial Sequence
  source: /note="Description of Artificial Sequence: Synthetic oligonucleotide"
actgataaggtgaggagtcag

SEQ ID NO: 25760 - DNA, 21 bp, Artificial Sequence
  source: /note="Description of Artificial Sequence: Synthetic oligonucleotide"
actgatcttcatctggagctt

SEQ ID NO: 25761 - DNA, 21 bp, Artificial Sequence
  source: /note="Description of Artificial Sequence: Synthetic oligonucleotide"
acggatttgtcgcatgggcat

SEQ ID NO: 25762 - DNA, 21 bp, Artificial Sequence
  source: /note="Description of Artificial Sequence: Synthetic oligonucleotide"
actgatctttattctcagtct

SEQ ID NO: 25763 - DNA, 21 bp, Artificial Sequence
  source: /note="Description of Artificial Sequence: Synthetic oligonucleotide"
actgatatgcagaggttgggt

SEQ ID NO: 25764 - DNA, 21 bp, Artificial Sequence
  source: /note="Description of Artificial Sequence: Synthetic oligonucleotide"
acggataataggattacggct

SEQ ID NO: 25765 - DNA, 21 bp, Artificial Sequence
  source: /note="Description of Artificial Sequence: Synthetic oligonucleotide"
actgatccgcattcggataag

SEQ ID NO: 25766 - DNA, 21 bp, Artificial Sequence
  source: /note="Description of Artificial Sequence: Synthetic oligonucleotide"
acggatcagagtctgatgtct

SEQ ID NO: 25767 - DNA, 21 bp, Artificial Sequence
  source: /note="Description of Artificial Sequence: Synthetic oligonucleotide"
actgatcgtggtggtgttcag

SEQ ID NO: 25768 - DNA, 21 bp, Artificial Sequence
  source: /note="Description of Artificial Sequence: Synthetic oligonucleotide"
actgataggtcggctttgagt

SEQ ID NO: 25769 - DNA, 21 bp, Artificial Sequence
  source: /note="Description of Artificial Sequence: Synthetic oligonucleotide"
actgataggagttcgctttct

SEQ ID NO: 25770 - DNA, 21 bp, Artificial Sequence
  source: /note="Description of Artificial Sequence: Synthetic oligonucleotide"
acggatcgggttccgagtttt

SEQ ID NO: 25771 - DNA, 21 bp, Artificial Sequence
  source: /note="Description of Artificial Sequence: Synthetic oligonucleotide"
acggatagtggtcctactcct

SEQ ID NO: 25772 - DNA, 21 bp, Artificial Sequence
  source: /note="Description of Artificial Sequence: Synthetic oligonucleotide"
actgatagtcatgtgctgtat

SEQ ID NO: 25773 - DNA, 21 bp, Artificial Sequence
  source: /note="Description of Artificial Sequence: Synthetic oligonucleotide"
acggatacgcatagttcggtg

SEQ ID NO: 25774 - DNA, 21 bp, Artificial Sequence
  source: /note="Description of Artificial Sequence: Synthetic oligonucleotide"
acggatacgtcgcggggtctg

SEQ ID NO: 25775 - DNA, 21 bp, Artificial Sequence
  source: /note="Description of Artificial Sequence: Synthetic oligonucleotide"
actgatacgacgggtggtccg

SEQ ID NO: 25776 - DNA, 21 bp, Artificial Sequence
  source: /note="Description of Artificial Sequence: Synthetic oligonucleotide"
actgatgttattactgttgcg

SEQ ID NO: 25777 - DNA, 21 bp, Artificial Sequence
  source: /note="Description of Artificial Sequence: Synthetic oligonucleotide"
acggatgttccgcatcctaat

SEQ ID NO: 25778 - DNA, 21 bp, Artificial Sequence
  source: /note="Description of Artificial Sequence: Synthetic oligonucleotide"
acggatgtgcgtccggctggg

SEQ ID NO: 25779 - DNA, 21 bp, Artificial Sequence
  source: /note="Description of Artificial Sequence: Synthetic oligonucleotide"
acggatgtgaggacgaagaat

SEQ ID NO: 25780 - DNA, 21 bp, Artificial Sequence
  source: /note="Description of Artificial Sequence: Synthetic oligonucleotide"
actgattgggagcatgatccg

SEQ ID NO: 25781 - DNA, 21 bp, Artificial Sequence
  source: /note="Description of Artificial Sequence: Synthetic oligonucleotide"
acggattatgatctttcgagt

SEQ ID NO: 25782 - DNA, 21 bp, Artificial Sequence
  source: /note="Description of Artificial Sequence: Synthetic oligonucleotide"
actgaggctgcgagtcgtcag

SEQ ID NO: 25783 - DNA, 21 bp, Artificial Sequence
  source: /note="Description of Artificial Sequence: Synthetic oligonucleotide"
actgaggcgcgtaatccggtt

SEQ ID NO: 25784 - DNA, 21 bp, Artificial Sequence
  source: /note="Description of Artificial Sequence: Synthetic oligonucleotide"
actgaggatacggcgccttgt

SEQ ID NO: 25785 - DNA, 21 bp, Artificial Sequence
  source: /note="Description of Artificial Sequence: Synthetic oligonucleotide"
actgagttttatgatttggag

SEQ ID NO: 25786 - DNA, 21 bp, Artificial Sequence
  source: /note="Description of Artificial Sequence: Synthetic oligonucleotide"
actgagggtagggctccgacg

SEQ ID NO: 25787 - DNA, 21 bp, Artificial Sequence
  source: /note="Description of Artificial Sequence: Synthetic oligonucleotide"
actgagcatgggactaagatt

SEQ ID NO: 25788 - DNA, 21 bp, Artificial Sequence
  source: /note="Description of Artificial Sequence: Synthetic oligonucleotide"
acggagctgaatagggcgatt

SEQ ID NO: 25789 - DNA, 21 bp, Artificial Sequence
  source: /note="Description of Artificial Sequence: Synthetic oligonucleotide"
acggagctttctcataatagg

SEQ ID NO: 25790 - DNA, 21 bp, Artificial Sequence
  source: /note="Description of Artificial Sequence: Synthetic oligonucleotide"
acggagcttagttcgcctagg

SEQ ID NO: 25791 - DNA, 21 bp, Artificial Sequence
  source: /note="Description of Artificial Sequence: Synthetic oligonucleotide"
actgagttggttattggtaag

SEQ ID NO: 25792 - DNA, 21 bp, Artificial Sequence
  source: /note="Description of Artificial Sequence: Synthetic oligonucleotide"
acggagaatgcggggacgggt

SEQ ID NO: 25793 - DNA, 21 bp, Artificial Sequence
  source: /note="Description of Artificial Sequence: Synthetic oligonucleotide"
actgagcctcctcatgttgct

SEQ ID NO: 25794 - DNA, 21 bp, Artificial Sequence
  source: /note="Description of Artificial Sequence: Synthetic oligonucleotide"
actgagcctccgtataggttg

SEQ ID NO: 25795 - DNA, 21 bp, Artificial Sequence
  source: /note="Description of Artificial Sequence: Synthetic oligonucleotide"
acggagcctcagattggtcgg

SEQ ID NO: 25796 - DNA, 21 bp, Artificial Sequence
  source: /note="Description of Artificial Sequence: Synthetic oligonucleotide"
actgagcctcggatggtttct

SEQ ID NO: 25797 - DNA, 21 bp, Artificial Sequence
  source: /note="Description of Artificial Sequence: Synthetic oligonucleotide"
acggagccttatgctccggat

SEQ ID NO: 25798 - DNA, 21 bp, Artificial Sequence
  source: /note="Description of Artificial Sequence: Synthetic oligonucleotide"
actgagccgtatacggatttt

SEQ ID NO: 25799 - DNA, 21 bp, Artificial Sequence
  source: /note="Description of Artificial Sequence: Synthetic oligonucleotide"
acggagagggcggatgagcat

SEQ ID NO: 25800 - DNA, 21 bp, Artificial Sequence
  source: /note="Description of Artificial Sequence: Synthetic oligonucleotide"
acggagcggcctagtcctacg

SEQ ID NO: 25801 - DNA, 21 bp, Artificial Sequence
  source: /note="Description of Artificial Sequence: Synthetic oligonucleotide"
actgagtcgcatcatcctctt

SEQ ID NO: 25802 - DNA, 21 bp, Artificial Sequence
  source: /note="Description of Artificial Sequence: Synthetic oligonucleotide"
actgagtcgacgtttaatatg

SEQ ID NO: 25803 - DNA, 21 bp, Artificial Sequence
  source: /note="Description of Artificial Sequence: Synthetic oligonucleotide"
acggagtctacgcatcagact

SEQ ID NO: 25804 - DNA, 21 bp, Artificial Sequence
  source: /note="Description of Artificial Sequence: Synthetic oligonucleotide"
acggagactgcgagtagtccg

SEQ ID NO: 25805 - DNA, 21 bp, Artificial Sequence
  source: /note="Description of Artificial Sequence: Synthetic oligonucleotide"
actgagactgggaattgtcat

SEQ ID NO: 25806 - DNA, 21 bp, Artificial Sequence
  source: /note="Description of Artificial Sequence: Synthetic oligonucleotide"
actgagactctgcataatcgt

SEQ ID NO: 25807 - DNA, 21 bp, Artificial Sequence
  source: /note="Description of Artificial Sequence: Synthetic oligonucleotide"
acggagacggttggtgatctt

SEQ ID NO: 25808 - DNA, 21 bp, Artificial Sequence
  source: /note="Description of Artificial Sequence: Synthetic oligonucleotide"
acggaggttaagttgttgcct

SEQ ID NO: 25809 - DNA, 21 bp, Artificial Sequence
  source: /note="Description of Artificial Sequence: Synthetic oligonucleotide"
actgaggttcgtccgggtttg

SEQ ID NO: 25810 - DNA, 21 bp, Artificial Sequence
  source: /note="Description of Artificial Sequence: Synthetic oligonucleotide"
actgaggtgcggtcgcctttg

SEQ ID NO: 25811 - DNA, 21 bp, Artificial Sequence
  source: /note="Description of Artificial Sequence: Synthetic oligonucleotide"
actgaggtgtcgtctaataag

SEQ ID NO: 25812 - DNA, 21 bp, Artificial Sequence
  source: /note="Description of Artificial Sequence: Synthetic oligonucleotide"
acggagtggagtagtaatgat

SEQ ID NO: 25813 - DNA, 21 bp, Artificial Sequence
  source: /note="Description of Artificial Sequence: Synthetic oligonucleotide"
acggagtatgctacgcggcct

SEQ ID NO: 25814 - DNA, 21 bp, Artificial Sequence
  source: /note="Description of Artificial Sequence: Synthetic oligonucleotide"
actgagtatacgcttcatggt

SEQ ID NO: 25815 - DNA, 21 bp, Artificial Sequence
  source: /note="Description of Artificial Sequence: Synthetic oligonucleotide"
acttttgcgtcgggggcgccg

SEQ ID NO: 25816 - DNA, 21 bp, Artificial Sequence
  source: /note="Description of Artificial Sequence: Synthetic oligonucleotide"
acgtttgcgagtccgctgctg

SEQ ID NO: 25817 - DNA, 21 bp, Artificial Sequence
  source: /note="Description of Artificial Sequence: Synthetic oligonucleotide"
acttttgatccgcagtgggcg

SEQ ID NO: 25818 - DNA, 21 bp, Artificial Sequence
  source: /note="Description of Artificial Sequence: Synthetic oligonucleotide"
acttttgatactagggggagt

SEQ ID NO: 25819 - DNA, 21 bp, Artificial Sequence
  source: /note="Description of Artificial Sequence: Synthetic oligonucleotide"
acgtttggtgctatttctgct

SEQ ID NO: 25820 - DNA, 21 bp, Artificial Sequence
  source: /note="Description of Artificial Sequence: Synthetic oligonucleotide"
acttttgggtcggatggtact

SEQ ID NO: 25821 - DNA, 21 bp, Artificial Sequence
  source: /note="Description of Artificial Sequence: Synthetic oligonucleotide"
acgtttggtacgtctattaag

SEQ ID NO: 25822 - DNA, 21 bp, Artificial Sequence
  source: /note="Description of Artificial Sequence: Synthetic oligonucleotide"
acgtttcatgcgcctagttct

SEQ ID NO: 25823 - DNA, 21 bp, Artificial Sequence
  source: /note="Description of Artificial Sequence: Synthetic oligonucleotide"
acgtttcataggactgataat

SEQ ID NO: 25824 - DNA, 21 bp, Artificial Sequence
  source: /note="Description of Artificial Sequence: Synthetic oligonucleotide"
acttttaaggatcctacggtg

SEQ ID NO: 25825 - DNA, 21 bp, Artificial Sequence
  source: /note="Description of Artificial Sequence: Synthetic oligonucleotide"
acgtttaagattactggtgat

SEQ ID NO: 25826 - DNA, 21 bp, Artificial Sequence
  source: /note="Description of Artificial Sequence: Synthetic oligonucleotide"
acgtttaatgggatgaatgag

SEQ ID NO: 25827 - DNA, 21 bp, Artificial Sequence
  source: /note="Description of Artificial Sequence: Synthetic oligonucleotide"
acgtttccgcttcctcgtact

SEQ ID NO: 25828 - DNA, 21 bp, Artificial Sequence
  source: /note="Description of Artificial Sequence: Synthetic oligonucleotide"
acttttccgctgagtgattgg

SEQ ID NO: 25829 - DNA, 21 bp, Artificial Sequence
  source: /note="Description of Artificial Sequence: Synthetic oligonucleotide"
acttttcctacgtctgggatg

SEQ ID NO: 25830 - DNA, 21 bp, Artificial Sequence
  source: /note="Description of Artificial Sequence: Synthetic oligonucleotide"
acttttcagcctacttctgtt

SEQ ID NO: 25831 - DNA, 21 bp, Artificial Sequence
  source: /note="Description of Artificial Sequence: Synthetic oligonucleotide"
acttttcggggtatgaaggat

SEQ ID NO: 25832 - DNA, 21 bp, Artificial Sequence
  source: /note="Description of Artificial Sequence: Synthetic oligonucleotide"
acttttcggacgtctgttgcg

SEQ ID NO: 25833 - DNA, 21 bp, Artificial Sequence
  source: /note="Description of Artificial Sequence: Synthetic oligonucleotide"
acttttagtattgttagtcct

SEQ ID NO: 25834 - DNA, 21 bp, Artificial Sequence
  source: /note="Description of Artificial Sequence: Synthetic oligonucleotide"
actttttcgccgcctaatttt

SEQ ID NO: 25835 - DNA, 21 bp, Artificial Sequence
  source: /note="Description of Artificial Sequence: Synthetic oligonucleotide"
acgttttctccgactttttcg

SEQ ID NO: 25836 - DNA, 21 bp, Artificial Sequence
  source: /note="Description of Artificial Sequence: Synthetic oligonucleotide"
acttttagtagtacgtcgcat

SEQ ID NO: 25837 - DNA, 21 bp, Artificial Sequence
  source: /note="Description of Artificial Sequence: Synthetic oligonucleotide"
acttttagttctgtggctgcg

SEQ ID NO: 25838 - DNA, 21 bp, Artificial Sequence
  source: /note="Description of Artificial Sequence: Synthetic oligonucleotide"
actttttctagtgttacgggt

SEQ ID NO: 25839 - DNA, 21 bp, Artificial Sequence
  source: /note="Description of Artificial Sequence: Synthetic oligonucleotide"
acgtttagtacgggtcgtgtg

SEQ ID NO: 25840 - DNA, 21 bp, Artificial Sequence
  source: /note="Description of Artificial Sequence: Synthetic oligonucleotide"
actttttctactggttcgcct

SEQ ID NO: 25841 - DNA, 21 bp, Artificial Sequence
  source: /note="Description of Artificial Sequence: Synthetic oligonucleotide"
actttttcgactaatacttcg

SEQ ID NO: 25842 - DNA, 21 bp, Artificial Sequence
  source: /note="Description of Artificial Sequence: Synthetic oligonucleotide"
acgttttctgtgtcgcagatt

SEQ ID NO: 25843 - DNA, 21 bp, Artificial Sequence
  source: /note="Description of Artificial Sequence: Synthetic oligonucleotide"
acgtttactaatcctacgaat

SEQ ID NO: 25844 - DNA, 21 bp, Artificial Sequence
  source: /note="Description of Artificial Sequence: Synthetic oligonucleotide"
acttttactcagttggctagt

SEQ ID NO: 25845 - DNA, 21 bp, Artificial Sequence
  source: /note="Description of Artificial Sequence: Synthetic oligonucleotide"
acgtttgttcgtgaggtggtt

SEQ ID NO: 25846 - DNA, 21 bp, Artificial Sequence
  source: /note="Description of Artificial Sequence: Synthetic oligonucleotide"
acttttgtgagtgggggtgat

SEQ ID NO: 25847 - DNA, 21 bp, Artificial Sequence
  source: /note="Description of Artificial Sequence: Synthetic oligonucleotide"
acgggggctggtcagactctg

SEQ ID NO: 25848 - DNA, 21 bp, Artificial Sequence
  source: /note="Description of Artificial Sequence: Synthetic oligonucleotide"
acgggtgcgcatgtgggtgag

SEQ ID NO: 25849 - DNA, 21 bp, Artificial Sequence
  source: /note="Description of Artificial Sequence: Synthetic oligonucleotide"
acgggggcgcttgctactctg

SEQ ID NO: 25850 - DNA, 21 bp, Artificial Sequence
  source: /note="Description of Artificial Sequence: Synthetic oligonucleotide"
acgggggcgcctcctcagatt

SEQ ID NO: 25851 - DNA, 21 bp, Artificial Sequence
  source: /note="Description of Artificial Sequence: Synthetic oligonucleotide"
actggtgcgtcggtgctgttt

SEQ ID NO: 25852 - DNA, 21 bp, Artificial Sequence
  source: /note="Description of Artificial Sequence: Synthetic oligonucleotide"
actggtgctgtttttactccg

SEQ ID NO: 25853 - DNA, 21 bp, Artificial Sequence
  source: /note="Description of Artificial Sequence: Synthetic oligonucleotide"
actggtgatgcgactcctttt

SEQ ID NO: 25854 - DNA, 21 bp, Artificial Sequence
  source: /note="Description of Artificial Sequence: Synthetic oligonucleotide"
acgggtgatcagaagtggcat

SEQ ID NO: 25855 - DNA, 21 bp, Artificial Sequence
  source: /note="Description of Artificial Sequence: Synthetic oligonucleotide"
actggtgatcagaatcggtat

SEQ ID NO: 25856 - DNA, 21 bp, Artificial Sequence
  source: /note="Description of Artificial Sequence: Synthetic oligonucleotide"
actggtgatacttctcgtacg

SEQ ID NO: 25857 - DNA, 21 bp, Artificial Sequence
  source: /note="Description of Artificial Sequence: Synthetic oligonucleotide"
acgggggatgtggatggttgg

SEQ ID NO: 25858 - DNA, 21 bp, Artificial Sequence
  source: /note="Description of Artificial Sequence: Synthetic oligonucleotide"
actggggagcagccgggtcat

SEQ ID NO: 25859 - DNA, 21 bp, Artificial Sequence
  source: /note="Description of Artificial Sequence: Synthetic oligonucleotide"
actgggttttcggatcagttt

SEQ ID NO: 25860 - DNA, 21 bp, Artificial Sequence
  source: /note="Description of Artificial Sequence: Synthetic oligonucleotide"
actgggggtgcgcagcgtggg

SEQ ID NO: 25861 - DNA, 21 bp, Artificial Sequence
  source: /note="Description of Artificial Sequence: Synthetic oligonucleotide"
acgggtgggtctccgacttct

SEQ ID NO: 25862 - DNA, 21 bp, Artificial Sequence
  source: /note="Description of Artificial Sequence: Synthetic oligonucleotide"
actggtgggtctactcgtctt

SEQ ID NO: 25863 - DNA, 21 bp, Artificial Sequence
  source: /note="Description of Artificial Sequence: Synthetic oligonucleotide"
acgggtgggtatgttctggct

SEQ ID NO: 25864 - DNA, 21 bp, Artificial Sequence
  source: /note="Description of Artificial Sequence: Synthetic oligonucleotide"
actgggcatgcgcagaatcag

SEQ ID NO: 25865 - DNA, 21 bp, Artificial Sequence
  source: /note="Description of Artificial Sequence: Synthetic oligonucleotide"
actgggcatgatactgttgag

SEQ ID NO: 25866 - DNA, 21 bp, Artificial Sequence
  source: /note="Description of Artificial Sequence: Synthetic oligonucleotide"
acggggcatacgaggttggat

SEQ ID NO: 25867 - DNA, 21 bp, Artificial Sequence
  source: /note="Description of Artificial Sequence: Synthetic oligonucleotide"
acggggcatacgtctacgctt

SEQ ID NO: 25868 - DNA, 21 bp, Artificial Sequence
  source: /note="Description of Artificial Sequence: Synthetic oligonucleotide"
actgggattgcgcctaattct

SEQ ID NO: 25869 - DNA, 21 bp, Artificial Sequence
  source: /note="Description of Artificial Sequence: Synthetic oligonucleotide"
actggtatttcgtcgcatatg

SEQ ID NO: 25870 - DNA, 21 bp, Artificial Sequence
  source: /note="Description of Artificial Sequence: Synthetic oligonucleotide"
actgggattacgggggctcct

SEQ ID NO: 25871 - DNA, 21 bp, Artificial Sequence
  source: /note="Description of Artificial Sequence: Synthetic oligonucleotide"
acgggtaaggttctgggtttt

SEQ ID NO: 25872 - DNA, 21 bp, Artificial Sequence
  source: /note="Description of Artificial Sequence: Synthetic oligonucleotide"
actgggctgtgtcctcatcct

SEQ ID NO: 25873 - DNA, 21 bp, Artificial Sequence
  source: /note="Description of Artificial Sequence: Synthetic oligonucleotide"
actggtctggggcttttgacg

SEQ ID NO: 25874 - DNA, 21 bp, Artificial Sequence
  source: /note="Description of Artificial Sequence: Synthetic oligonucleotide"
actggtctgatgggtcctgtg

SEQ ID NO: 25875 - DNA, 21 bp, Artificial Sequence
  source: /note="Description of Artificial Sequence: Synthetic oligonucleotide"
acgggtcttaatcattttaat

SEQ ID NO: 25876 - DNA, 21 bp, Artificial Sequence
  source: /note="Description of Artificial Sequence: Synthetic oligonucleotide"
acgggtctgaatcctgcgctg

SEQ ID NO: 25877 - DNA, 21 bp, Artificial Sequence
  source: /note="Description of Artificial Sequence: Synthetic oligonucleotide"
actgggttgcctgtggggttt

SEQ ID NO: 25878 - DNA, 21 bp, Artificial Sequence
  source: /note="Description of Artificial Sequence: Synthetic oligonucleotide"
actgggcttcggggtacggtt

SEQ ID NO: 25879 - DNA, 21 bp, Artificial Sequence
  source: /note="Description of Artificial Sequence: Synthetic oligonucleotide"
acgggtcttgttactgatgag

SEQ ID NO: 25880 - DNA, 21 bp, Artificial Sequence
  source: /note="Description of Artificial Sequence: Synthetic oligonucleotide"
acggggatgaataattttagt

SEQ ID NO: 25881 - DNA, 21 bp, Artificial Sequence
  source: /note="Description of Artificial Sequence: Synthetic oligonucleotide"
actgggatgcaggctgctctg

SEQ ID NO: 25882 - DNA, 21 bp, Artificial Sequence
  source: /note="Description of Artificial Sequence: Synthetic oligonucleotide"
acggggaatcatattcgtatt

SEQ ID NO: 25883 - DNA, 21 bp, Artificial Sequence
  source: /note="Description of Artificial Sequence: Synthetic oligonucleotide"
actgggaatcatgttactttt

SEQ ID NO: 25884 - DNA, 21 bp, Artificial Sequence
  source: /note="Description of Artificial Sequence: Synthetic oligonucleotide"
actgggaatatttcgccgctg

SEQ ID NO: 25885 - DNA, 21 bp, Artificial Sequence
  source: /note="Description of Artificial Sequence: Synthetic oligonucleotide"
acggggaattcgccgcatgcg

SEQ ID NO: 25886 - DNA, 21 bp, Artificial Sequence
  source: /note="Description of Artificial Sequence: Synthetic oligonucleotide"
acgggtcctgctcctttggat

SEQ ID NO: 25887 - DNA, 21 bp, Artificial Sequence
  source: /note="Description of Artificial Sequence: Synthetic oligonucleotide"
actggtccggcgcgtggttcg

SEQ ID NO: 25888 - DNA, 21 bp, Artificial Sequence
  source: /note="Description of Artificial Sequence: Synthetic oligonucleotide"
actgggcctgattatcctaag

SEQ ID NO: 25889 - DNA, 21 bp, Artificial Sequence
  source: /note="Description of Artificial Sequence: Synthetic oligonucleotide"
actgggcctcatttgaaggcg

SEQ ID NO: 25890 - DNA, 21 bp, Artificial Sequence
  source: /note="Description of Artificial Sequence: Synthetic oligonucleotide"
actgggcctattaatgctccg

SEQ ID NO: 25891 - DNA, 21 bp, Artificial Sequence
  source: /note="Description of Artificial Sequence: Synthetic oligonucleotide"
actgggccgaatacgtcgacg

SEQ ID NO: 25892 - DNA, 21 bp, Artificial Sequence
  source: /note="Description of Artificial Sequence: Synthetic oligonucleotide"
acgggtcctcctactacgatg

SEQ ID NO: 25893 - DNA, 21 bp, Artificial Sequence
  source: /note="Description of Artificial Sequence: Synthetic oligonucleotide"
acggggccgcgtcttagtacg

SEQ ID NO: 25894 - DNA, 21 bp, Artificial Sequence
  source: /note="Description of Artificial Sequence: Synthetic oligonucleotide"
actggtccgagtgcgcgggct

SEQ ID NO: 25895 - DNA, 21 bp, Artificial Sequence
  source: /note="Description of Artificial Sequence: Synthetic oligonucleotide"
acggggccgtctattcatact

SEQ ID NO: 25896 - DNA, 21 bp, Artificial Sequence
  source: /note="Description of Artificial Sequence: Synthetic oligonucleotide"
acggggccttctttggatcgt

SEQ ID NO: 25897 - DNA, 21 bp, Artificial Sequence
  source: /note="Description of Artificial Sequence: Synthetic oligonucleotide"
actggtccgtcgcggacgtcg

SEQ ID NO: 25898 - DNA, 21 bp, Artificial Sequence
  source: /note="Description of Artificial Sequence: Synthetic oligonucleotide"
acgggtcagggtaatgcggat

SEQ ID NO: 25899 - DNA, 21 bp, Artificial Sequence
  source: /note="Description of Artificial Sequence: Synthetic oligonucleotide"
actggtcagagggcgggtcag

SEQ ID NO: 25900 - DNA, 21 bp, Artificial Sequence
  source: /note="Description of Artificial Sequence: Synthetic oligonucleotide"
actggtcagaggatggatctg

SEQ ID NO: 25901 - DNA, 21 bp, Artificial Sequence
  source: /note="Description of Artificial Sequence: Synthetic oligonucleotide"
acggggcagcgtcagaatgtt

SEQ ID NO: 25902 - DNA, 21 bp, Artificial Sequence
  source: /note="Description of Artificial Sequence: Synthetic oligonucleotide"
actgggcggcctgttggtaat

SEQ ID NO: 25903 - DNA, 21 bp, Artificial Sequence
  source: /note="Description of Artificial Sequence: Synthetic oligonucleotide"
actggtcgggttgctgggagt

SEQ ID NO: 25904 - DNA, 21 bp, Artificial Sequence
  source: /note="Description of Artificial Sequence: Synthetic oligonucleotide"
actggttctgctggggagaag

SEQ ID NO: 25905 - DNA, 21 bp, Artificial Sequence
  source: /note="Description of Artificial Sequence: Synthetic oligonucleotide"
actggttctgcgcatgtttcg

SEQ ID NO: 25906 - DNA, 21 bp, Artificial Sequence
  source: /note="Description of Artificial Sequence: Synthetic oligonucleotide"
actggttctgctatgcgtccg

SEQ ID NO: 25907 - DNA, 21 bp, Artificial Sequence
  source: /note="Description of Artificial Sequence: Synthetic oligonucleotide"
acggggtcggggcatggtcct

SEQ ID NO: 25908 - DNA, 21 bp, Artificial Sequence
  source: /note="Description of Artificial Sequence: Synthetic oligonucleotide"
actggttcgaagcctgggtcg

SEQ ID NO: 25909 - DNA, 21 bp, Artificial Sequence
  source: /note="Description of Artificial Sequence: Synthetic oligonucleotide"
acggggtcgctgcagtatgat

SEQ ID NO: 25910 - DNA, 21 bp, Artificial Sequence
  source: /note="Description of Artificial Sequence: Synthetic oligonucleotide"
actggttcgtcggggtttctt

SEQ ID NO: 25911 - DNA, 21 bp, Artificial Sequence
  source: /note="Description of Artificial Sequence: Synthetic oligonucleotide"
acggggtctagtgttcgggcg

SEQ ID NO: 25912 - DNA, 21 bp, Artificial Sequence
  source: /note="Description of Artificial Sequence: Synthetic oligonucleotide"
actgggactgggcgtattcat

SEQ ID NO: 25913 - DNA, 21 bp, Artificial Sequence
  source: /note="Description of Artificial Sequence: Synthetic oligonucleotide"
acggggacttcgtcttgggtg

SEQ ID NO: 25914 - DNA, 21 bp, Artificial Sequence
  source: /note="Description of Artificial Sequence: Synthetic oligonucleotide"
actgggacgactttgcatcct

SEQ ID NO: 25915 - DNA, 21 bp, Artificial Sequence
  source: /note="Description of Artificial Sequence: Synthetic oligonucleotide"
actggggttccgcggggtttt

SEQ ID NO: 25916 - DNA, 21 bp, Artificial Sequence
  source: /note="Description of Artificial Sequence: Synthetic oligonucleotide"
acgggtgtgcctcggccttat

SEQ ID NO: 25917 - DNA, 21 bp, Artificial Sequence
  source: /note="Description of Artificial Sequence: Synthetic oligonucleotide"
actggggtgccggtggatgcg

SEQ ID NO: 25918 - DNA, 21 bp, Artificial Sequence
  source: /note="Description of Artificial Sequence: Synthetic oligonucleotide"
acggggtatgagtttaagttg

SEQ ID NO: 25919 - DNA, 21 bp, Artificial Sequence
  source: /note="Description of Artificial Sequence: Synthetic oligonucleotide"
actggttataagagtccgaat

SEQ ID NO: 25920 - DNA, 21 bp, Artificial Sequence
  source: /note="Description of Artificial Sequence: Synthetic oligonucleotide"
acgcatgctgctgcggatttt

SEQ ID NO: 25921 - DNA, 21 bp, Artificial Sequence
  source: /note="Description of Artificial Sequence: Synthetic oligonucleotide"
actcatgctattattgtgacg

SEQ ID NO: 25922 - DNA, 21 bp, Artificial Sequence
  source: /note="Description of Artificial Sequence: Synthetic oligonucleotide"
acgcatgcgcagacgtctgtt

SEQ ID NO: 25923 - DNA, 21 bp, Artificial Sequence
  source: /note="Description of Artificial Sequence: Synthetic oligonucleotide"
actcatgatgaggatcggagg

SEQ ID NO: 25924 - DNA, 21 bp, Artificial Sequence
  source: /note="Description of Artificial Sequence: Synthetic oligonucleotide"
actcatgatcatgctgattct

SEQ ID NO: 25925 - DNA, 21 bp, Artificial Sequence
  source: /note="Description of Artificial Sequence: Synthetic oligonucleotide"
acgcatgatctgtcgcttgct

SEQ ID NO: 25926 - DNA, 21 bp, Artificial Sequence
  source: /note="Description of Artificial Sequence: Synthetic oligonucleotide"
actcatgatccgaggcatggg

SEQ ID NO: 25927 - DNA, 21 bp, Artificial Sequence
  source: /note="Description of Artificial Sequence: Synthetic oligonucleotide"
actcatgagcattattcgcat

SEQ ID NO: 25928 - DNA, 21 bp, Artificial Sequence
  source: /note="Description of Artificial Sequence: Synthetic oligonucleotide"
actcatgagccgaggcgggcg

SEQ ID NO: 25929 - DNA, 21 bp, Artificial Sequence
  source: /note="Description of Artificial Sequence: Synthetic oligonucleotide"
acgcatgagagtgctgcggcg

SEQ ID NO: 25930 - DNA, 21 bp, Artificial Sequence
  source: /note="Description of Artificial Sequence: Synthetic oligonucleotide"
acgcattttcctggtcttccg

SEQ ID NO: 25931 - DNA, 21 bp, Artificial Sequence
  source: /note="Description of Artificial Sequence: Synthetic oligonucleotide"
acgcatgggcgtcttccgaat

SEQ ID NO: 25932 - DNA, 21 bp, Artificial Sequence
  source: /note="Description of Artificial Sequence: Synthetic oligonucleotide"
actcatcatgctgcgttgact

SEQ ID NO: 25933 - DNA, 21 bp, Artificial Sequence
  source: /note="Description of Artificial Sequence: Synthetic oligonucleotide"
acgcatcattcgggttcgatt

SEQ ID NO: 25934 - DNA, 21 bp, Artificial Sequence
  source: /note="Description of Artificial Sequence: Synthetic oligonucleotide"
acgcatcatgtgactcagact

SEQ ID NO: 25935 - DNA, 21 bp, Artificial Sequence
  source: /note="Description of Artificial Sequence: Synthetic oligonucleotide"
acgcatattccttcgaggccg

SEQ ID NO: 25936 - DNA, 21 bp, Artificial Sequence
  source: /note="Description of Artificial Sequence: Synthetic oligonucleotide"
acgcatattcgttcggcgcag

SEQ ID NO: 25937 - DNA, 21 bp, Artificial Sequence
  source: /note="Description of Artificial Sequence: Synthetic oligonucleotide"
acgcataaggagactcatatg

SEQ ID NO: 25938 - DNA, 21 bp, Artificial Sequence
  source: /note="Description of Artificial Sequence: Synthetic oligonucleotide"
acgcataagtttccgacgtct

SEQ ID NO: 25939 - DNA, 21 bp, Artificial Sequence
  source: /note="Description of Artificial Sequence: Synthetic oligonucleotide"
acgcataagctgactgctgag

SEQ ID NO: 25940 - DNA, 21 bp, Artificial Sequence
  source: /note="Description of Artificial Sequence: Synthetic oligonucleotide"
actcataagtctatttcgaat

SEQ ID NO: 25941 - DNA, 21 bp, Artificial Sequence
  source: /note="Description of Artificial Sequence: Synthetic oligonucleotide"
actcatctggctagttcggat

SEQ ID NO: 25942 - DNA, 21 bp, Artificial Sequence
  source: /note="Description of Artificial Sequence: Synthetic oligonucleotide"
acgcatcttggtgagtcggtg

SEQ ID NO: 25943 - DNA, 21 bp, Artificial Sequence
  source: /note="Description of Artificial Sequence: Synthetic oligonucleotide"
acgcatctgtctaatactctt

SEQ ID NO: 25944 - DNA, 21 bp, Artificial Sequence
  source: /note="Description of Artificial Sequence: Synthetic oligonucleotide"
actcatttgtctacggctaag

SEQ ID NO: 25945 - DNA, 21 bp, Artificial Sequence
  source: /note="Description of Artificial Sequence: Synthetic oligonucleotide"
actcatttgtctacgccgtct

SEQ ID NO: 25946 - DNA, 21 bp, Artificial Sequence
  source: /note="Description of Artificial Sequence: Synthetic oligonucleotide"
actcatatgattggtaatact

SEQ ID NO: 25947 - DNA, 21 bp, Artificial Sequence
  source: /note="Description of Artificial Sequence: Synthetic oligonucleotide"
acgcataatgcgcttactgtg

SEQ ID NO: 25948 - DNA, 21 bp, Artificial Sequence
  source: /note="Description of Artificial Sequence: Synthetic oligonucleotide"
actcataatttgtctattcgg

SEQ ID NO: 25949 - DNA, 21 bp, Artificial Sequence
  source: /note="Description of Artificial Sequence: Synthetic oligonucleotide"
actcatcctgcggttacgcag

SEQ ID NO: 25950 - DNA, 21 bp, Artificial Sequence
  source: /note="Description of Artificial Sequence: Synthetic oligonucleotide"
actcatcctgatcgtggtctg

SEQ ID NO: 25951 - DNA, 21 bp, Artificial Sequence
  source: /note="Description of Artificial Sequence: Synthetic oligonucleotide"
actcatcctaagccgacgttg

SEQ ID NO: 25952 - DNA, 21 bp, Artificial Sequence
  source: /note="Description of Artificial Sequence: Synthetic oligonucleotide"
acgcatccgcagagtgttgat

SEQ ID NO: 25953 - DNA, 21 bp, Artificial Sequence
  source: /note="Description of Artificial Sequence: Synthetic oligonucleotide"
actcatccttcggttcctgtt

SEQ ID NO: 25954 - DNA, 21 bp, Artificial Sequence
  source: /note="Description of Artificial Sequence: Synthetic oligonucleotide"
acgcatccggttgggattttg

SEQ ID NO: 25955 - DNA, 21 bp, Artificial Sequence
  source: /note="Description of Artificial Sequence: Synthetic oligonucleotide"
acgcatcctgttagttcggtt

SEQ ID NO: 25956 - DNA, 21 bp, Artificial Sequence
  source: /note="Description of Artificial Sequence: Synthetic oligonucleotide"
actcatcagacgtctgtttat

SEQ ID NO: 25957 - DNA, 21 bp, Artificial Sequence
  source: /note="Description of Artificial Sequence: Synthetic oligonucleotide"
actcatcaggttcctagtgtg

SEQ ID NO: 25958 - DNA, 21 bp, Artificial Sequence
  source: /note="Description of Artificial Sequence: Synthetic oligonucleotide"
actcatagggatggtattatg

SEQ ID NO: 25959 - DNA, 21 bp, Artificial Sequence
  source: /note="Description of Artificial Sequence: Synthetic oligonucleotide"
acgcataggcaggatacgtcg

SEQ ID NO: 25960 - DNA, 21 bp, Artificial Sequence
  source: /note="Description of Artificial Sequence: Synthetic oligonucleotide"
actcatcggtctctggatgtt

SEQ ID NO: 25961 - DNA, 21 bp, Artificial Sequence
  source: /note="Description of Artificial Sequence: Synthetic oligonucleotide"
acgcatcggagtcagacggtt

SEQ ID NO: 25962 - DNA, 21 bp, Artificial Sequence
  source: /note="Description of Artificial Sequence: Synthetic oligonucleotide"
actcattcggcgtataatcat

SEQ ID NO: 25963 - DNA, 21 bp, Artificial Sequence
  source: /note="Description of Artificial Sequence: Synthetic oligonucleotide"
actcattctgagtcttctaag

SEQ ID NO: 25964 - DNA, 21 bp, Artificial Sequence
  source: /note="Description of Artificial Sequence: Synthetic oligonucleotide"
actcattctggtgctaataat

SEQ ID NO: 25965 - DNA, 21 bp, Artificial Sequence
  source: /note="Description of Artificial Sequence: Synthetic oligonucleotide"
actcattcgcatgttgatgat

SEQ ID NO: 25966 - DNA, 21 bp, Artificial Sequence
  source: /note="Description of Artificial Sequence: Synthetic oligonucleotide"
acgcattctatggtgatgcct

SEQ ID NO: 25967 - DNA, 21 bp, Artificial Sequence
  source: /note="Description of Artificial Sequence: Synthetic oligonucleotide"
acgcatagtcctttgactcgt

SEQ ID NO: 25968 - DNA, 21 bp, Artificial Sequence
  source: /note="Description of Artificial Sequence: Synthetic oligonucleotide"
actcatacgttgaatactagg

SEQ ID NO: 25969 - DNA, 21 bp, Artificial Sequence
  source: /note="Description of Artificial Sequence: Synthetic oligonucleotide"
acgcatacgcctctgcctgct

SEQ ID NO: 25970 - DNA, 21 bp, Artificial Sequence
  source: /note="Description of Artificial Sequence: Synthetic oligonucleotide"
acgcatactcgtactcttatg

SEQ ID NO: 25971 - DNA, 21 bp, Artificial Sequence
  source: /note="Description of Artificial Sequence: Synthetic oligonucleotide"
actcatacgtctgctgcggag

SEQ ID NO: 25972 - DNA, 21 bp, Artificial Sequence
  source: /note="Description of Artificial Sequence: Synthetic oligonucleotide"
acgcatacggttggtactcag

SEQ ID NO: 25973 - DNA, 21 bp, Artificial Sequence
  source: /note="Description of Artificial Sequence: Synthetic oligonucleotide"
actcatgttgctgaggttacg

SEQ ID NO: 25974 - DNA, 21 bp, Artificial Sequence
  source: /note="Description of Artificial Sequence: Synthetic oligonucleotide"
acgcatgttccgcctatgcgg

SEQ ID NO: 25975 - DNA, 21 bp, Artificial Sequence
  source: /note="Description of Artificial Sequence: Synthetic oligonucleotide"
actcattatgatgtggttatg

SEQ ID NO: 25976 - DNA, 21 bp, Artificial Sequence
  source: /note="Description of Artificial Sequence: Synthetic oligonucleotide"
actattgctgatgatcagaag

SEQ ID NO: 25977 - DNA, 21 bp, Artificial Sequence
  source: /note="Description of Artificial Sequence: Synthetic oligonucleotide"
acgattgctgatatgcgtacg

SEQ ID NO: 25978 - DNA, 21 bp, Artificial Sequence
  source: /note="Description of Artificial Sequence: Synthetic oligonucleotide"
acgatttgtaatgatgggcct

SEQ ID NO: 25979 - DNA, 21 bp, Artificial Sequence
  source: /note="Description of Artificial Sequence: Synthetic oligonucleotide"
acgattgatccgcctctgact

SEQ ID NO: 25980 - DNA, 21 bp, Artificial Sequence
  source: /note="Description of Artificial Sequence: Synthetic oligonucleotide"
acgattgatacgacgtcgttg

SEQ ID NO: 25981 - DNA, 21 bp, Artificial Sequence
  source: /note="Description of Artificial Sequence: Synthetic oligonucleotide"
actattgagcagcgggagcgt

SEQ ID NO: 25982 - DNA, 21 bp, Artificial Sequence
  source: /note="Description of Artificial Sequence: Synthetic oligonucleotide"
actattgagtcgccgggtgtg

SEQ ID NO: 25983 - DNA, 21 bp, Artificial Sequence
  source: /note="Description of Artificial Sequence: Synthetic oligonucleotide"
acgattggtcatgagagttat

SEQ ID NO: 25984 - DNA, 21 bp, Artificial Sequence
  source: /note="Description of Artificial Sequence: Synthetic oligonucleotide"
acgattgggaggcttatgcag

SEQ ID NO: 25985 - DNA, 21 bp, Artificial Sequence
  source: /note="Description of Artificial Sequence: Synthetic oligonucleotide"
actattgggtctgttaggctg

SEQ ID NO: 25986 - DNA, 21 bp, Artificial Sequence
  source: /note="Description of Artificial Sequence: Synthetic oligonucleotide"
actattcatcggcctgatatg

SEQ ID NO: 25987 - DNA, 21 bp, Artificial Sequence
  source: /note="Description of Artificial Sequence: Synthetic oligonucleotide"
actattattccgtctaagctt

SEQ ID NO: 25988 - DNA, 21 bp, Artificial Sequence
  source: /note="Description of Artificial Sequence: Synthetic oligonucleotide"
acgattattcgtaaggattct

SEQ ID NO: 25989 - DNA, 21 bp, Artificial Sequence
  source: /note="Description of Artificial Sequence: Synthetic oligonucleotide"
acgattaaggctcaggtgagt

SEQ ID NO: 25990 - DNA, 21 bp, Artificial Sequence
  source: /note="Description of Artificial Sequence: Synthetic oligonucleotide"
actattaagcttaatgttggg

SEQ ID NO: 25991 - DNA, 21 bp, Artificial Sequence
  source: /note="Description of Artificial Sequence: Synthetic oligonucleotide"
actattaagccgctttctcag

SEQ ID NO: 25992 - DNA, 21 bp, Artificial Sequence
  source: /note="Description of Artificial Sequence: Synthetic oligonucleotide"
acgattctgaatcctaataat

SEQ ID NO: 25993 - DNA, 21 bp, Artificial Sequence
  source: /note="Description of Artificial Sequence: Synthetic oligonucleotide"
acgattcttcggactgaggag

SEQ ID NO: 25994 - DNA, 21 bp, Artificial Sequence
  source: /note="Description of Artificial Sequence: Synthetic oligonucleotide"
actattctttcgagtcatggg

SEQ ID NO: 25995 - DNA, 21 bp, Artificial Sequence
  source: /note="Description of Artificial Sequence: Synthetic oligonucleotide"
acgattctgagtacggggtcg

SEQ ID NO: 25996 - DNA, 21 bp, Artificial Sequence
  source: /note="Description of Artificial Sequence: Synthetic oligonucleotide"
actattaatcatgcggagcag

SEQ ID NO: 25997 - DNA, 21 bp, Artificial Sequence
  source: /note="Description of Artificial Sequence: Synthetic oligonucleotide"
actattaattgggtgggggat

SEQ ID NO: 25998 - DNA, 21 bp, Artificial Sequence
  source: /note="Description of Artificial Sequence: Synthetic oligonucleotide"
actattccgtctcagattgct

SEQ ID NO: 25999 - DNA, 21 bp, Artificial Sequence
  source: /note="Description of Artificial Sequence: Synthetic oligonucleotide"
acgattcagcttcgttctgct

SEQ ID NO: 26000 - DNA, 21 bp, Artificial Sequence
  source: /note="Description of Artificial Sequence: Synthetic oligonucleotide"
acgattcgtgaggcttttact

SEQ ID NO: 26001 - DNA, 21 bp, Artificial Sequence
  source: /note="Description of Artificial Sequence: Synthetic oligonucleotide"
actattcgtgggagttttctt

SEQ ID NO: 26002 - DNA, 21 bp, Artificial Sequence
  source: /note="Description of Artificial Sequence: Synthetic oligonucleotide"
acgattcgtggtactattagt

SEQ ID NO: 26003 - DNA, 21 bp, Artificial Sequence
  source: /note="Description of Artificial Sequence: Synthetic oligonucleotide"
actattcgggttaatccgacg

SEQ ID NO: 26004 - DNA, 21 bp, Artificial Sequence
  source: /note="Description of Artificial Sequence: Synthetic oligonucleotide"
actattagggtttctcttgct

SEQ ID NO: 26005 - DNA, 21 bp, Artificial Sequence
  source: /note="Description of Artificial Sequence: Synthetic oligonucleotide"
acgatttctaatgcgagttct

SEQ ID NO: 26006 - DNA, 21 bp, Artificial Sequence
  source: /note="Description of Artificial Sequence: Synthetic oligonucleotide"
acgatttcgtcttctcagagt

SEQ ID NO: 26007 - DNA, 21 bp, Artificial Sequence
  source: /note="Description of Artificial Sequence: Synthetic oligonucleotide"
actattagtacgtctaagcat

SEQ ID NO: 26008 - DNA, 21 bp, Artificial Sequence
  source: /note="Description of Artificial Sequence: Synthetic oligonucleotide"
acgattactgcgcatgatcct

SEQ ID NO: 26009 - DNA, 21 bp, Artificial Sequence
  source: /note="Description of Artificial Sequence: Synthetic oligonucleotide"
acgattacgcctcgtgctgat

SEQ ID NO: 26010 - DNA, 21 bp, Artificial Sequence
  source: /note="Description of Artificial Sequence: Synthetic oligonucleotide"
actattacttctcctaagatg

SEQ ID NO: 26011 - DNA, 21 bp, Artificial Sequence
  source: /note="Description of Artificial Sequence: Synthetic oligonucleotide"
actattacgtatgagctgacg

SEQ ID NO: 26012 - DNA, 21 bp, Artificial Sequence
  source: /note="Description of Artificial Sequence: Synthetic oligonucleotide"
actattgtgcgtgagctgacg

SEQ ID NO: 26013 - DNA, 21 bp, Artificial Sequence
  source: /note="Description of Artificial Sequence: Synthetic oligonucleotide"
acgattgttagtgatccgcgg

SEQ ID NO: 26014 - DNA, 21 bp, Artificial Sequence
  source: /note="Description of Artificial Sequence: Synthetic oligonucleotide"
actattgtgtctggtgttgtt

SEQ ID NO: 26015 - DNA, 21 bp, Artificial Sequence
  source: /note="Description of Artificial Sequence: Synthetic oligonucleotide"
acgattgttacgggggctagt

SEQ ID NO: 26016 - DNA, 21 bp, Artificial Sequence
  source: /note="Description of Artificial Sequence: Synthetic oligonucleotide"
acgatttattatgatgtgacg

SEQ ID NO: 26017 - DNA, 21 bp, Artificial Sequence
  source: /note="Description of Artificial Sequence: Synthetic oligonucleotide"
acgaaggcgggttcttttcat

SEQ ID NO: 26018 - DNA, 21 bp, Artificial Sequence
  source: /note="Description of Artificial Sequence: Synthetic oligonucleotide"
acgaaggctcattgttgtggt

SEQ ID NO: 26019 - DNA, 21 bp, Artificial Sequence
  source: /note="Description of Artificial Sequence: Synthetic oligonucleotide"
actaaggctctggttcatatg

SEQ ID NO: 26020 - DNA, 21 bp, Artificial Sequence
  source: /note="Description of Artificial Sequence: Synthetic oligonucleotide"
actaaggatcaggttcgtttg

SEQ ID NO: 26021 - DNA, 21 bp, Artificial Sequence
  source: /note="Description of Artificial Sequence: Synthetic oligonucleotide"
actaaggatcggccgtttctg

SEQ ID NO: 26022 - DNA, 21 bp, Artificial Sequence
  source: /note="Description of Artificial Sequence: Synthetic oligonucleotide"
actaaggagtgtatgttgact

SEQ ID NO: 26023 - DNA, 21 bp, Artificial Sequence
  source: /note="Description of Artificial Sequence: Synthetic oligonucleotide"
actaagggtggttttaatgat

SEQ ID NO: 26024 - DNA, 21 bp, Artificial Sequence
  source: /note="Description of Artificial Sequence: Synthetic oligonucleotide"
acgaaggggggtaagcagccg

SEQ ID NO: 26025 - DNA, 21 bp, Artificial Sequence
  source: /note="Description of Artificial Sequence: Synthetic oligonucleotide"
actaagggtcgggagccggtg

SEQ ID NO: 26026 - DNA, 21 bp, Artificial Sequence
  source: /note="Description of Artificial Sequence: Synthetic oligonucleotide"
acgaagggtgttcctgggtat

SEQ ID NO: 26027 - DNA, 21 bp, Artificial Sequence
  source: /note="Description of Artificial Sequence: Synthetic oligonucleotide"
acgaagcatcttatgccggcg

SEQ ID NO: 26028 - DNA, 21 bp, Artificial Sequence
  source: /note="Description of Artificial Sequence: Synthetic oligonucleotide"
acgaagattgctggtttttcg

SEQ ID NO: 26029 - DNA, 21 bp, Artificial Sequence
  source: /note="Description of Artificial Sequence: Synthetic oligonucleotide"
acgaagattgggagtgctatg

SEQ ID NO: 26030 - DNA, 21 bp, Artificial Sequence
  source: /note="Description of Artificial Sequence: Synthetic oligonucleotide"
acgaagttgaatgcgtttgat

SEQ ID NO: 26031 - DNA, 21 bp, Artificial Sequence
  source: /note="Description of Artificial Sequence: Synthetic oligonucleotide"
actaagcttccgaattctagt

SEQ ID NO: 26032 - DNA, 21 bp, Artificial Sequence
  source: /note="Description of Artificial Sequence: Synthetic oligonucleotide"
actaagcttcaggcttcgctt

SEQ ID NO: 26033 - DNA, 21 bp, Artificial Sequence
  source: /note="Description of Artificial Sequence: Synthetic oligonucleotide"
actaagttggtgactgagagt

SEQ ID NO: 26034 - DNA, 21 bp, Artificial Sequence
  source: /note="Description of Artificial Sequence: Synthetic oligonucleotide"
acgaagatgaatgcttctggg

SEQ ID NO: 26035 - DNA, 21 bp, Artificial Sequence
  source: /note="Description of Artificial Sequence: Synthetic oligonucleotide"
actaagaatcttgatcatacg

SEQ ID NO: 26036 - DNA, 21 bp, Artificial Sequence
  source: /note="Description of Artificial Sequence: Synthetic oligonucleotide"
acgaagaatcttacggagcgt

SEQ ID NO: 26037 - DNA, 21 bp, Artificial Sequence
  source: /note="Description of Artificial Sequence: Synthetic oligonucleotide"
actaagaataggatggatctt

SEQ ID NO: 26038 - DNA, 21 bp, Artificial Sequence
  source: /note="Description of Artificial Sequence: Synthetic oligonucleotide"
actaagcctggttcgattttt

SEQ ID NO: 26039 - DNA, 21 bp, Artificial Sequence
  source: /note="Description of Artificial Sequence: Synthetic oligonucleotide"
actaagccgcctgttcagagt

SEQ ID NO: 26040 - DNA, 21 bp, Artificial Sequence
  source: /note="Description of Artificial Sequence: Synthetic oligonucleotide"
actaagccgcagagtagttat

SEQ ID NO: 26041 - DNA, 21 bp, Artificial Sequence
  source: /note="Description of Artificial Sequence: Synthetic oligonucleotide"
actaagcgtgagtcgcattct

SEQ ID NO: 26042 - DNA, 21 bp, Artificial Sequence
  source: /note="Description of Artificial Sequence: Synthetic oligonucleotide"
acgaagtcggctgctacggct

SEQ ID NO: 26043 - DNA, 21 bp, Artificial Sequence
  source: /note="Description of Artificial Sequence: Synthetic oligonucleotide"
acgaagagtgggttgacgcag

SEQ ID NO: 26044 - DNA, 21 bp, Artificial Sequence
  source: /note="Description of Artificial Sequence: Synthetic oligonucleotide"
acgaagtctggtaatagtctg

SEQ ID NO: 26045 - DNA, 21 bp, Artificial Sequence
  source: /note="Description of Artificial Sequence: Synthetic oligonucleotide"
actaagagtcagactcatctg

SEQ ID NO: 26046 - DNA, 21 bp, Artificial Sequence
  source: /note="Description of Artificial Sequence: Synthetic oligonucleotide"
actaagtcgtctgttttgcct

SEQ ID NO: 26047 - DNA, 21 bp, Artificial Sequence
  source: /note="Description of Artificial Sequence: Synthetic oligonucleotide"
actaagagttattctccgaat

SEQ ID NO: 26048 - DNA, 21 bp, Artificial Sequence
  source: /note="Description of Artificial Sequence: Synthetic oligonucleotide"
acgaagactggtgatggtcct

SEQ ID NO: 26049 - DNA, 21 bp, Artificial Sequence
  source: /note="Description of Artificial Sequence: Synthetic oligonucleotide"
actaagacgtcgtttcctaat

SEQ ID NO: 26050 - DNA, 21 bp, Artificial Sequence
  source: /note="Description of Artificial Sequence: Synthetic oligonucleotide"
actaaggttgctctggatcct

SEQ ID NO: 26051 - DNA, 21 bp, Artificial Sequence
  source: /note="Description of Artificial Sequence: Synthetic oligonucleotide"
actaaggtggctcgggaggtg

SEQ ID NO: 26052 - DNA, 21 bp, Artificial Sequence
  source: /note="Description of Artificial Sequence: Synthetic oligonucleotide"
actcttgctttgtatgcgtct

SEQ ID NO: 26053 - DNA, 21 bp, Artificial Sequence
  source: /note="Description of Artificial Sequence: Synthetic oligonucleotide"
acgctggctccgactactaag

SEQ ID NO: 26054 - DNA, 21 bp, Artificial Sequence
  source: /note="Description of Artificial Sequence: Synthetic oligonucleotide"
actctggcgtctgggagggct

SEQ ID NO: 26055 - DNA, 21 bp, Artificial Sequence
  source: /note="Description of Artificial Sequence: Synthetic oligonucleotide"
actctggcgtctcgtagtgtt

SEQ ID NO: 26056 - DNA, 21 bp, Artificial Sequence
  source: /note="Description of Artificial Sequence: Synthetic oligonucleotide"
actttggctacgtcttctaat

SEQ ID NO: 26057 - DNA, 21 bp, Artificial Sequence
  source: /note="Description of Artificial Sequence: Synthetic oligonucleotide"
actttggcggtgaattcgatg

SEQ ID NO: 26058 - DNA, 21 bp, Artificial Sequence
  source: /note="Description of Artificial Sequence: Synthetic oligonucleotide"
acgcttgatatgacgagtgtg

SEQ ID NO: 26059 - DNA, 21 bp, Artificial Sequence
  source: /note="Description of Artificial Sequence: Synthetic oligonucleotide"
actctggataattctcgtgct

SEQ ID NO: 26060 - DNA, 21 bp, Artificial Sequence
  source: /note="Description of Artificial Sequence: Synthetic oligonucleotide"
actttggatgttcattatgtg

SEQ ID NO: 26061 - DNA, 21 bp, Artificial Sequence
  source: /note="Description of Artificial Sequence: Synthetic oligonucleotide"
actctggaggctcagactgat

SEQ ID NO: 26062 - DNA, 21 bp, Artificial Sequence
  source: /note="Description of Artificial Sequence: Synthetic oligonucleotide"
actctggagcatacttgtcgg

SEQ ID NO: 26063 - DNA, 21 bp, Artificial Sequence
  source: /note="Description of Artificial Sequence: Synthetic oligonucleotide"
acgcttgagcctcggaaggat

SEQ ID NO: 26064 - DNA, 21 bp, Artificial Sequence
  source: /note="Description of Artificial Sequence: Synthetic oligonucleotide"
actttggagcagtttggtagt

SEQ ID NO: 26065 - DNA, 21 bp, Artificial Sequence
  source: /note="Description of Artificial Sequence: Synthetic oligonucleotide"
acgctggagcagtataagctg

SEQ ID NO: 26066 - DNA, 21 bp, Artificial Sequence
  source: /note="Description of Artificial Sequence: Synthetic oligonucleotide"
acgttggagaggaagctggat

SEQ ID NO: 26067 - DNA, 21 bp, Artificial Sequence
  source: /note="Description of Artificial Sequence: Synthetic oligonucleotide"
actctggagcggccgtttatt

SEQ ID NO: 26068 - DNA, 21 bp, Artificial Sequence
  source: /note="Description of Artificial Sequence: Synthetic oligonucleotide"
acgctgtttaatagtgagaag

SEQ ID NO: 26069 - DNA, 21 bp, Artificial Sequence
  source: /note="Description of Artificial Sequence: Synthetic oligonucleotide"
acgctttttcagcagcctcct

SEQ ID NO: 26070 - DNA, 21 bp, Artificial Sequence
  source: /note="Description of Artificial Sequence: Synthetic oligonucleotide"
actctttttcgggatggttcg

SEQ ID NO: 26071 - DNA, 21 bp, Artificial Sequence
  source: /note="Description of Artificial Sequence: Synthetic oligonucleotide"
acgttggggggttctccggtt

SEQ ID NO: 26072 - DNA, 21 bp, Artificial Sequence
  source: /note="Description of Artificial Sequence: Synthetic oligonucleotide"
actttgggtgggagtcgggct

SEQ ID NO: 26073 - DNA, 21 bp, Artificial Sequence
  source: /note="Description of Artificial Sequence: Synthetic oligonucleotide"
actttggggcatgcttttgct

SEQ ID NO: 26074 - DNA, 21 bp, Artificial Sequence
  source: /note="Description of Artificial Sequence: Synthetic oligonucleotide"
actttgggtcatgttccgccg

SEQ ID NO: 26075 - DNA, 21 bp, Artificial Sequence
  source: /note="Description of Artificial Sequence: Synthetic oligonucleotide"
acgcttggtattacggctcat

SEQ ID NO: 26076 - DNA, 21 bp, Artificial Sequence
  source: /note="Description of Artificial Sequence: Synthetic oligonucleotide"
acgttggggattgtgacgcag

SEQ ID NO: 26077 - DNA, 21 bp, Artificial Sequence
  source: /note="Description of Artificial Sequence: Synthetic oligonucleotide"
acgctgggtctgacgatgccg

SEQ ID NO: 26078 - DNA, 21 bp, Artificial Sequence
  source: /note="Description of Artificial Sequence: Synthetic oligonucleotide"
acgttgggtcctaattctcgg

SEQ ID NO: 26079 - DNA, 21 bp, Artificial Sequence
  source: /note="Description of Artificial Sequence: Synthetic oligonucleotide"
actctggggcagacgacgggg

SEQ ID NO: 26080 - DNA, 21 bp, Artificial Sequence
  source: /note="Description of Artificial Sequence: Synthetic oligonucleotide"
acgttgcatcagattccggcg

SEQ ID NO: 26081 - DNA, 21 bp, Artificial Sequence
  source: /note="Description of Artificial Sequence: Synthetic oligonucleotide"
actttgcatagtagtagttct

SEQ ID NO: 26082 - DNA, 21 bp, Artificial Sequence
  source: /note="Description of Artificial Sequence: Synthetic oligonucleotide"
acgctgattggtaatgatacg

SEQ ID NO: 26083 - DNA, 21 bp, Artificial Sequence
  source: /note="Description of Artificial Sequence: Synthetic oligonucleotide"
acgcttatttcttctgttacg

SEQ ID NO: 26084 - DNA, 21 bp, Artificial Sequence
  source: /note="Description of Artificial Sequence: Synthetic oligonucleotide"
acgttgaaggctgaggatctt

SEQ ID NO: 26085 - DNA, 21 bp, Artificial Sequence
  source: /note="Description of Artificial Sequence: Synthetic oligonucleotide"
actcttaagggtcctggtcag

SEQ ID NO: 26086 - DNA, 21 bp, Artificial Sequence
  source: /note="Description of Artificial Sequence: Synthetic oligonucleotide"
acgcttaagcggggtctggat

SEQ ID NO: 26087 - DNA, 21 bp, Artificial Sequence
  source: /note="Description of Artificial Sequence: Synthetic oligonucleotide"
acgttgaagtcgaatgcgaag

SEQ ID NO: 26088 - DNA, 21 bp, Artificial Sequence
  source: /note="Description of Artificial Sequence: Synthetic oligonucleotide"
acgcttctgcctgcgagtcct

SEQ ID NO: 26089 - DNA, 21 bp, Artificial Sequence
  source: /note="Description of Artificial Sequence: Synthetic oligonucleotide"
acgcttttgccgggtgatccg

SEQ ID NO: 26090 - DNA, 21 bp, Artificial Sequence
  source: /note="Description of Artificial Sequence: Synthetic oligonucleotide"
actctgcttccgcatcctacg

SEQ ID NO: 26091 - DNA, 21 bp, Artificial Sequence
  source: /note="Description of Artificial Sequence: Synthetic oligonucleotide"
acgttgttgactgatgatctt

SEQ ID NO: 26092 - DNA, 21 bp, Artificial Sequence
  source: /note="Description of Artificial Sequence: Synthetic oligonucleotide"
actttgatgcaggtttcgggg

SEQ ID NO: 26093 - DNA, 21 bp, Artificial Sequence
  source: /note="Description of Artificial Sequence: Synthetic oligonucleotide"
acgctgatgcgtggtgcttct

SEQ ID NO: 26094 - DNA, 21 bp, Artificial Sequence
  source: /note="Description of Artificial Sequence: Synthetic oligonucleotide"
actctgaattcggcgaagaag

SEQ ID NO: 26095 - DNA, 21 bp, Artificial Sequence
  source: /note="Description of Artificial Sequence: Synthetic oligonucleotide"
acgcttaatagtgagcggatg

SEQ ID NO: 26096 - DNA, 21 bp, Artificial Sequence
  source: /note="Description of Artificial Sequence: Synthetic oligonucleotide"
actttgccgcatcgggtggcg

SEQ ID NO: 26097 - DNA, 21 bp, Artificial Sequence
  source: /note="Description of Artificial Sequence: Synthetic oligonucleotide"
acgcttcctcatagtcctaag

SEQ ID NO: 26098 - DNA, 21 bp, Artificial Sequence
  source: /note="Description of Artificial Sequence: Synthetic oligonucleotide"
acgttgccgaagacgaatctg

SEQ ID NO: 26099 - DNA, 21 bp, Artificial Sequence
  source: /note="Description of Artificial Sequence: Synthetic oligonucleotide"
actcttcctttgacttctacg

SEQ ID NO: 26100 - DNA, 21 bp, Artificial Sequence
  source: /note="Description of Artificial Sequence: Synthetic oligonucleotide"
actcttcctaattatctggct

SEQ ID NO: 26101 - DNA, 21 bp, Artificial Sequence
  source: /note="Description of Artificial Sequence: Synthetic oligonucleotide"
acgctgccgccgaattcgcct

SEQ ID NO: 26102 - DNA, 21 bp, Artificial Sequence
  source: /note="Description of Artificial Sequence: Synthetic oligonucleotide"
acgttgccttcggagcgtgtg

SEQ ID NO: 26103 - DNA, 21 bp, Artificial Sequence
  source: /note="Description of Artificial Sequence: Synthetic oligonucleotide"
acgttgcctacgacgctggtt

SEQ ID NO: 26104 - DNA, 21 bp, Artificial Sequence
  source: /note="Description of Artificial Sequence: Synthetic oligonucleotide"
actttgccggtgaataatttg

SEQ ID NO: 26105 - DNA, 21 bp, Artificial Sequence
  source: /note="Description of Artificial Sequence: Synthetic oligonucleotide"
actttgcaggataatcgtgct

SEQ ID NO: 26106 - DNA, 21 bp, Artificial Sequence
  source: /note="Description of Artificial Sequence: Synthetic oligonucleotide"
acgcttcaggaggggactggg

SEQ ID NO: 26107 - DNA, 21 bp, Artificial Sequence
  source: /note="Description of Artificial Sequence: Synthetic oligonucleotide"
acgcttcagtttggtgctggg

SEQ ID NO: 26108 - DNA, 21 bp, Artificial Sequence
  source: /note="Description of Artificial Sequence: Synthetic oligonucleotide"
actctgcagggtgggtctctt

SEQ ID NO: 26109 - DNA, 21 bp, Artificial Sequence
  source: /note="Description of Artificial Sequence: Synthetic oligonucleotide"
acgttgcagccgttgcgtatt

SEQ ID NO: 26110 - DNA, 21 bp, Artificial Sequence
  source: /note="Description of Artificial Sequence: Synthetic oligonucleotide"
acgcttcgggatactgctgat

SEQ ID NO: 26111 - DNA, 21 bp, Artificial Sequence
  source: /note="Description of Artificial Sequence: Synthetic oligonucleotide"
actctgcgtgagtctgatacg

SEQ ID NO: 26112 - DNA, 21 bp, Artificial Sequence
  source: /note="Description of Artificial Sequence: Synthetic oligonucleotide"
acgttgcgtggtgctgaggat

SEQ ID NO: 26113 - DNA, 21 bp, Artificial Sequence
  source: /note="Description of Artificial Sequence: Synthetic oligonucleotide"
acgttgaggcttactgctggg

SEQ ID NO: 26114 - DNA, 21 bp, Artificial Sequence
  source: /note="Description of Artificial Sequence: Synthetic oligonucleotide"
acgctgcgtatgcagctgaat

SEQ ID NO: 26115 - DNA, 21 bp, Artificial Sequence
  source: /note="Description of Artificial Sequence: Synthetic oligonucleotide"
actctgcggaattctccggct

SEQ ID NO: 26116 - DNA, 21 bp, Artificial Sequence
  source: /note="Description of Artificial Sequence: Synthetic oligonucleotide"
acgttgcggcctttgcaggct

SEQ ID NO: 26117 - DNA, 21 bp, Artificial Sequence
  source: /note="Description of Artificial Sequence: Synthetic oligonucleotide"
acgctgcgttctgcgggtcct

SEQ ID NO: 26118 - DNA, 21 bp, Artificial Sequence
  source: /note="Description of Artificial Sequence: Synthetic oligonucleotide"
actcttcggacgcttgcggag

SEQ ID NO: 26119 - DNA, 21 bp, Artificial Sequence
  source: /note="Description of Artificial Sequence: Synthetic oligonucleotide"
acgctgagtgcgcttcctcct

SEQ ID NO: 26120 - DNA, 21 bp, Artificial Sequence
  source: /note="Description of Artificial Sequence: Synthetic oligonucleotide"
actttgtcggatcgtccgcct

SEQ ID NO: 26121 - DNA, 21 bp, Artificial Sequence
  source: /note="Description of Artificial Sequence: Synthetic oligonucleotide"
acgctgtcggattctgttgat

SEQ ID NO: 26122 - DNA, 21 bp, Artificial Sequence
  source: /note="Description of Artificial Sequence: Synthetic oligonucleotide"
actcttagtgagaatttgccg

SEQ ID NO: 26123 - DNA, 21 bp, Artificial Sequence
  source: /note="Description of Artificial Sequence: Synthetic oligonucleotide"
acgctttcgcatcttccgtat

SEQ ID NO: 26124 - DNA, 21 bp, Artificial Sequence
  source: /note="Description of Artificial Sequence: Synthetic oligonucleotide"
actctgagtcataatgctcct

SEQ ID NO: 26125 - DNA, 21 bp, Artificial Sequence
  source: /note="Description of Artificial Sequence: Synthetic oligonucleotide"
acgctgtctcatcgtcttccg

SEQ ID NO: 26126 - DNA, 21 bp, Artificial Sequence
  source: /note="Description of Artificial Sequence: Synthetic oligonucleotide"
actctgtctaagcatctgctg

SEQ ID NO: 26127 - DNA, 21 bp, Artificial Sequence
  source: /note="Description of Artificial Sequence: Synthetic oligonucleotide"
actttgtctaagccgccgtcg

SEQ ID NO: 26128 - DNA, 21 bp, Artificial Sequence
  source: /note="Description of Artificial Sequence: Synthetic oligonucleotide"
acgctgtctctttctgcgatt

SEQ ID NO: 26129 - DNA, 21 bp, Artificial Sequence
  source: /note="Description of Artificial Sequence: Synthetic oligonucleotide"
actctgtctcttagtaataat

SEQ ID NO: 26130 - DNA, 21 bp, Artificial Sequence
  source: /note="Description of Artificial Sequence: Synthetic oligonucleotide"
actttgagtctttcgacgggg

SEQ ID NO: 26131 - DNA, 21 bp, Artificial Sequence
  source: /note="Description of Artificial Sequence: Synthetic oligonucleotide"
actcttagtaattctgttccg

SEQ ID NO: 26132 - DNA, 21 bp, Artificial Sequence
  source: /note="Description of Artificial Sequence: Synthetic oligonucleotide"
actctttctccgaagtctgtg

SEQ ID NO: 26133 - DNA, 21 bp, Artificial Sequence
  source: /note="Description of Artificial Sequence: Synthetic oligonucleotide"
acgctttctccgtctggtagt

SEQ ID NO: 26134 - DNA, 21 bp, Artificial Sequence
  source: /note="Description of Artificial Sequence: Synthetic oligonucleotide"
actctttcgccgacgacgagt

SEQ ID NO: 26135 - DNA, 21 bp, Artificial Sequence
  source: /note="Description of Artificial Sequence: Synthetic oligonucleotide"
actcttagtcagcgtccgcct

SEQ ID NO: 26136 - DNA, 21 bp, Artificial Sequence
  source: /note="Description of Artificial Sequence: Synthetic oligonucleotide"
acgctgagtcagtctactcat

SEQ ID NO: 26137 - DNA, 21 bp, Artificial Sequence
  source: /note="Description of Artificial Sequence: Synthetic oligonucleotide"
acgctgtcgcgtactttggag

SEQ ID NO: 26138 - DNA, 21 bp, Artificial Sequence
  source: /note="Description of Artificial Sequence: Synthetic oligonucleotide"
actctttcgagtggtcagacg

SEQ ID NO: 26139 - DNA, 21 bp, Artificial Sequence
  source: /note="Description of Artificial Sequence: Synthetic oligonucleotide"
actcttagttcgcgtcctatg

SEQ ID NO: 26140 - DNA, 21 bp, Artificial Sequence
  source: /note="Description of Artificial Sequence: Synthetic oligonucleotide"
actttgagttcgcgtcagagt

SEQ ID NO: 26141 - DNA, 21 bp, Artificial Sequence
  source: /note="Description of Artificial Sequence: Synthetic oligonucleotide"
actctttctactgtgagtctg

SEQ ID NO: 26142 - DNA, 21 bp, Artificial Sequence
  source: /note="Description of Artificial Sequence: Synthetic oligonucleotide"
acgttgagttatacgccggct

SEQ ID NO: 26143 - DNA, 21 bp, Artificial Sequence
  source: /note="Description of Artificial Sequence: Synthetic oligonucleotide"
actctgacttttcggggggat

SEQ ID NO: 26144 - DNA, 21 bp, Artificial Sequence
  source: /note="Description of Artificial Sequence: Synthetic oligonucleotide"
acgttgactaagaatagtacg

SEQ ID NO: 26145 - DNA, 21 bp, Artificial Sequence
  source: /note="Description of Artificial Sequence: Synthetic oligonucleotide"
acgctgactccgttgtatgag

SEQ ID NO: 26146 - DNA, 21 bp, Artificial Sequence
  source: /note="Description of Artificial Sequence: Synthetic oligonucleotide"
actttgacgccgaatgagagt

SEQ ID NO: 26147 - DNA, 21 bp, Artificial Sequence
  source: /note="Description of Artificial Sequence: Synthetic oligonucleotide"
acgttgacgcgtctttcgcct

SEQ ID NO: 26148 - DNA, 21 bp, Artificial Sequence
  source: /note="Description of Artificial Sequence: Synthetic oligonucleotide"
acgctgacgaggatgaatgtg

SEQ ID NO: 26149 - DNA, 21 bp, Artificial Sequence
  source: /note="Description of Artificial Sequence: Synthetic oligonucleotide"
actctgactactaatgtttct

SEQ ID NO: 26150 - DNA, 21 bp, Artificial Sequence
  source: /note="Description of Artificial Sequence: Synthetic oligonucleotide"
acgctgactactcctatgaat

SEQ ID NO: 26151 - DNA, 21 bp, Artificial Sequence
  source: /note="Description of Artificial Sequence: Synthetic oligonucleotide"
actcttactgtgcttgatcct

SEQ ID NO: 26152 - DNA, 21 bp, Artificial Sequence
  source: /note="Description of Artificial Sequence: Synthetic oligonucleotide"
acgttgacgtatcatcgtgat

SEQ ID NO: 26153 - DNA, 21 bp, Artificial Sequence
  source: /note="Description of Artificial Sequence: Synthetic oligonucleotide"
actttggtgggtcattattat

SEQ ID NO: 26154 - DNA, 21 bp, Artificial Sequence
  source: /note="Description of Artificial Sequence: Synthetic oligonucleotide"
actcttgtgggtccggctagt

SEQ ID NO: 26155 - DNA, 21 bp, Artificial Sequence
  source: /note="Description of Artificial Sequence: Synthetic oligonucleotide"
acgctggttccgcgggatctg

SEQ ID NO: 26156 - DNA, 21 bp, Artificial Sequence
  source: /note="Description of Artificial Sequence: Synthetic oligonucleotide"
acgttggttcaggcggagatg

SEQ ID NO: 26157 - DNA, 21 bp, Artificial Sequence
  source: /note="Description of Artificial Sequence: Synthetic oligonucleotide"
actctggttactagggagaat

SEQ ID NO: 26158 - DNA, 21 bp, Artificial Sequence
  source: /note="Description of Artificial Sequence: Synthetic oligonucleotide"
actcttgttgtgcggtcgcct

SEQ ID NO: 26159 - DNA, 21 bp, Artificial Sequence
  source: /note="Description of Artificial Sequence: Synthetic oligonucleotide"
actctgtatggtcatccgtcg

SEQ ID NO: 26160 - DNA, 21 bp, Artificial Sequence
  source: /note="Description of Artificial Sequence: Synthetic oligonucleotide"
acgctgtatcttcattctgag

SEQ ID NO: 26161 - DNA, 21 bp, Artificial Sequence
  source: /note="Description of Artificial Sequence: Synthetic oligonucleotide"
actctttataatacgactatg

SEQ ID NO: 26162 - DNA, 21 bp, Artificial Sequence
  source: /note="Description of Artificial Sequence: Synthetic oligonucleotide"
actctgtatcgtgttaatccg

SEQ ID NO: 26163 - DNA, 21 bp, Artificial Sequence
  source: /note="Description of Artificial Sequence: Synthetic oligonucleotide"
acgttgtattctcagtctgag

SEQ ID NO: 26164 - DNA, 21 bp, Artificial Sequence
  source: /note="Description of Artificial Sequence: Synthetic oligonucleotide"
actctgtatacgaattcggtt

SEQ ID NO: 26165 - DNA, 21 bp, Artificial Sequence
  source: /note="Description of Artificial Sequence: Synthetic oligonucleotide"
actatggctatgaatcctcgt

SEQ ID NO: 26166 - DNA, 21 bp, Artificial Sequence
  source: /note="Description of Artificial Sequence: Synthetic oligonucleotide"
actatggctccgcgggatttg

SEQ ID NO: 26167 - DNA, 21 bp, Artificial Sequence
  source: /note="Description of Artificial Sequence: Synthetic oligonucleotide"
acgatggataatttgaggcag

SEQ ID NO: 26168 - DNA, 21 bp, Artificial Sequence
  source: /note="Description of Artificial Sequence: Synthetic oligonucleotide"
actatggatcgtacgccgggg

SEQ ID NO: 26169 - DNA, 21 bp, Artificial Sequence
  source: /note="Description of Artificial Sequence: Synthetic oligonucleotide"
actatggatgtgttgtctttt

SEQ ID NO: 26170 - DNA, 21 bp, Artificial Sequence
  source: /note="Description of Artificial Sequence: Synthetic oligonucleotide"
acgatggagcggggtgatagt

SEQ ID NO: 26171 - DNA, 21 bp, Artificial Sequence
  source: /note="Description of Artificial Sequence: Synthetic oligonucleotide"
acgatgcatgcgcatccgctg

SEQ ID NO: 26172 - DNA, 21 bp, Artificial Sequence
  source: /note="Description of Artificial Sequence: Synthetic oligonucleotide"
actatgcttactcgtacgggg

SEQ ID NO: 26173 - DNA, 21 bp, Artificial Sequence
  source: /note="Description of Artificial Sequence: Synthetic oligonucleotide"
actatgatgaagcctttggat

SEQ ID NO: 26174 - DNA, 21 bp, Artificial Sequence
  source: /note="Description of Artificial Sequence: Synthetic oligonucleotide"
actatgaataagccgacgctt

SEQ ID NO: 26175 - DNA, 21 bp, Artificial Sequence
  source: /note="Description of Artificial Sequence: Synthetic oligonucleotide"
actatgaatcttggggagatg

SEQ ID NO: 26176 - DNA, 21 bp, Artificial Sequence
  source: /note="Description of Artificial Sequence: Synthetic oligonucleotide"
actatgaatcctacgcagaat

SEQ ID NO: 26177 - DNA, 21 bp, Artificial Sequence
  source: /note="Description of Artificial Sequence: Synthetic oligonucleotide"
acgatgaatactttggttact

SEQ ID NO: 26178 - DNA, 21 bp, Artificial Sequence
  source: /note="Description of Artificial Sequence: Synthetic oligonucleotide"
acgatgcctaatcatgggcct

SEQ ID NO: 26179 - DNA, 21 bp, Artificial Sequence
  source: /note="Description of Artificial Sequence: Synthetic oligonucleotide"
actatgccgagtgagtcggtg

SEQ ID NO: 26180 - DNA, 21 bp, Artificial Sequence
  source: /note="Description of Artificial Sequence: Synthetic oligonucleotide"
acgatgcaggcgccgtctgcg

SEQ ID NO: 26181 - DNA, 21 bp, Artificial Sequence
  source: /note="Description of Artificial Sequence: Synthetic oligonucleotide"
acgatgcagtatgggtcgact

SEQ ID NO: 26182 - DNA, 21 bp, Artificial Sequence
  source: /note="Description of Artificial Sequence: Synthetic oligonucleotide"
actatgcgggaggggccggct

SEQ ID NO: 26183 - DNA, 21 bp, Artificial Sequence
  source: /note="Description of Artificial Sequence: Synthetic oligonucleotide"
acgatgcggattgatctgcct

SEQ ID NO: 26184 - DNA, 21 bp, Artificial Sequence
  source: /note="Description of Artificial Sequence: Synthetic oligonucleotide"
actatgcgtagtagtgagatt

SEQ ID NO: 26185 - DNA, 21 bp, Artificial Sequence
  source: /note="Description of Artificial Sequence: Synthetic oligonucleotide"
acgatgcgtacgaatccggat

SEQ ID NO: 26186 - DNA, 21 bp, Artificial Sequence
  source: /note="Description of Artificial Sequence: Synthetic oligonucleotide"
actatgagtgggacttcgagg

SEQ ID NO: 26187 - DNA, 21 bp, Artificial Sequence
  source: /note="Description of Artificial Sequence: Synthetic oligonucleotide"
acgatgagtattgcgctggct

SEQ ID NO: 26188 - DNA, 21 bp, Artificial Sequence
  source: /note="Description of Artificial Sequence: Synthetic oligonucleotide"
acgatgtctaagccttcttat

SEQ ID NO: 26189 - DNA, 21 bp, Artificial Sequence
  source: /note="Description of Artificial Sequence: Synthetic oligonucleotide"
actatgagtatgagtattact

SEQ ID NO: 26190 - DNA, 21 bp, Artificial Sequence
  source: /note="Description of Artificial Sequence: Synthetic oligonucleotide"
acgatgtctcctgggaataat

SEQ ID NO: 26191 - DNA, 21 bp, Artificial Sequence
  source: /note="Description of Artificial Sequence: Synthetic oligonucleotide"
actatgtcgcctcatagtccg

SEQ ID NO: 26192 - DNA, 21 bp, Artificial Sequence
  source: /note="Description of Artificial Sequence: Synthetic oligonucleotide"
acgatgtcgccgctgaatagg

SEQ ID NO: 26193 - DNA, 21 bp, Artificial Sequence
  source: /note="Description of Artificial Sequence: Synthetic oligonucleotide"
acgatgacgcatcatcagttt

SEQ ID NO: 26194 - DNA, 21 bp, Artificial Sequence
  source: /note="Description of Artificial Sequence: Synthetic oligonucleotide"
acgatgactcgttctatgctg

SEQ ID NO: 26195 - DNA, 21 bp, Artificial Sequence
  source: /note="Description of Artificial Sequence: Synthetic oligonucleotide"
actatgacggttctgactatg

SEQ ID NO: 26196 - DNA, 21 bp, Artificial Sequence
  source: /note="Description of Artificial Sequence: Synthetic oligonucleotide"
acgatggtggcgtcgatggcg

SEQ ID NO: 26197 - DNA, 21 bp, Artificial Sequence
  source: /note="Description of Artificial Sequence: Synthetic oligonucleotide"
actatggttaagcagggtaat

SEQ ID NO: 26198 - DNA, 21 bp, Artificial Sequence
  source: /note="Description of Artificial Sequence: Synthetic oligonucleotide"
acgatggtgtcgggtggtcat

SEQ ID NO: 26199 - DNA, 21 bp, Artificial Sequence
  source: /note="Description of Artificial Sequence: Synthetic oligonucleotide"
actatggttgttgtgtctagt

SEQ ID NO: 26200 - DNA, 21 bp, Artificial Sequence
  source: /note="Description of Artificial Sequence: Synthetic oligonucleotide"
actatggtttatactgataat

SEQ ID NO: 26201 - DNA, 21 bp, Artificial Sequence
  source: /note="Description of Artificial Sequence: Synthetic oligonucleotide"
actaatgctgcgctgcagtct

SEQ ID NO: 26202 - DNA, 21 bp, Artificial Sequence
  source: /note="Description of Artificial Sequence: Synthetic oligonucleotide"
acgaatgctattaagtctggg

SEQ ID NO: 26203 - DNA, 21 bp, Artificial Sequence
  source: /note="Description of Artificial Sequence: Synthetic oligonucleotide"
actaatgcgtcttggcctccg

SEQ ID NO: 26204 - DNA, 21 bp, Artificial Sequence
  source: /note="Description of Artificial Sequence: Synthetic oligonucleotide"
acgaatgatcctatgatgcct

SEQ ID NO: 26205 - DNA, 21 bp, Artificial Sequence
  source: /note="Description of Artificial Sequence: Synthetic oligonucleotide"
acgaatgagcataagttttcg

SEQ ID NO: 26206 - DNA, 21 bp, Artificial Sequence
  source: /note="Description of Artificial Sequence: Synthetic oligonucleotide"
acgaatgagtctagtgggacg

SEQ ID NO: 26207 - DNA, 21 bp, Artificial Sequence
  source: /note="Description of Artificial Sequence: Synthetic oligonucleotide"
actaattttttgcctcatggt

SEQ ID NO: 26208 - DNA, 21 bp, Artificial Sequence
  source: /note="Description of Artificial Sequence: Synthetic oligonucleotide"
actaattttcctcagtctgcg

SEQ ID NO: 26209 - DNA, 21 bp, Artificial Sequence
  source: /note="Description of Artificial Sequence: Synthetic oligonucleotide"
actaattttcagctgactgtt

SEQ ID NO: 26210 - DNA, 21 bp, Artificial Sequence
  source: /note="Description of Artificial Sequence: Synthetic oligonucleotide"
actaatgggcgggtgacggcg

SEQ ID NO: 26211 - DNA, 21 bp, Artificial Sequence
  source: /note="Description of Artificial Sequence: Synthetic oligonucleotide"
actaatggtacgaagcctact

SEQ ID NO: 26212 - DNA, 21 bp, Artificial Sequence
  source: /note="Description of Artificial Sequence: Synthetic oligonucleotide"
actaatggggttaagttgtct

SEQ ID NO: 26213 - DNA, 21 bp, Artificial Sequence
  source: /note="Description of Artificial Sequence: Synthetic oligonucleotide"
acgaatcatattgctgctctg

SEQ ID NO: 26214 - DNA, 21 bp, Artificial Sequence
  source: /note="Description of Artificial Sequence: Synthetic oligonucleotide"
acgaatcattcttctccgctt

SEQ ID NO: 26215 - DNA, 21 bp, Artificial Sequence
  source: /note="Description of Artificial Sequence: Synthetic oligonucleotide"
acgaataagacggtgggttgt

SEQ ID NO: 26216 - DNA, 21 bp, Artificial Sequence
  source: /note="Description of Artificial Sequence: Synthetic oligonucleotide"
actaatttggctgcgcggcct

SEQ ID NO: 26217 - DNA, 21 bp, Artificial Sequence
  source: /note="Description of Artificial Sequence: Synthetic oligonucleotide"
actaatcttaagcgtatggat

SEQ ID NO: 26218 - DNA, 21 bp, Artificial Sequence
  source: /note="Description of Artificial Sequence: Synthetic oligonucleotide"
acgaatttgaatggtaatgat

SEQ ID NO: 26219 - DNA, 21 bp, Artificial Sequence
  source: /note="Description of Artificial Sequence: Synthetic oligonucleotide"
acgaatcttaatactcgtcct

SEQ ID NO: 26220 - DNA, 21 bp, Artificial Sequence
  source: /note="Description of Artificial Sequence: Synthetic oligonucleotide"
acgaatcttaggtctgagttg

SEQ ID NO: 26221 - DNA, 21 bp, Artificial Sequence
  source: /note="Description of Artificial Sequence: Synthetic oligonucleotide"
acgaatctgcggactgctgtt

SEQ ID NO: 26222 - DNA, 21 bp, Artificial Sequence
  source: /note="Description of Artificial Sequence: Synthetic oligonucleotide"
actaatatgaagactgattct

SEQ ID NO: 26223 - DNA, 21 bp, Artificial Sequence
  source: /note="Description of Artificial Sequence: Synthetic oligonucleotide"
actaatatgcctatgaatcct

SEQ ID NO: 26224 - DNA, 21 bp, Artificial Sequence
  source: /note="Description of Artificial Sequence: Synthetic oligonucleotide"
acgaatatgccgccgcttccg

SEQ ID NO: 26225 - DNA, 21 bp, Artificial Sequence
  source: /note="Description of Artificial Sequence: Synthetic oligonucleotide"
acgaatatgccgccgcttacg

SEQ ID NO: 26226 - DNA, 21 bp, Artificial Sequence
  source: /note="Description of Artificial Sequence: Synthetic oligonucleotide"
actaataatggtggtatgtat

SEQ ID NO: 26227 - DNA, 21 bp, Artificial Sequence
  source: /note="Description of Artificial Sequence: Synthetic oligonucleotide"
actaataatagtacgaatccg

SEQ ID NO: 26228 - DNA, 21 bp, Artificial Sequence
  source: /note="Description of Artificial Sequence: Synthetic oligonucleotide"
acgaatcctgcgccgaattcg

SEQ ID NO: 26229 - DNA, 21 bp, Artificial Sequence
  source: /note="Description of Artificial Sequence: Synthetic oligonucleotide"
actaatccgggtcctcttgat

SEQ ID NO: 26230 - DNA, 21 bp, Artificial Sequence
  source: /note="Description of Artificial Sequence: Synthetic oligonucleotide"
actaatcctcatagggatacg

SEQ ID NO: 26231 - DNA, 21 bp, Artificial Sequence
  source: /note="Description of Artificial Sequence: Synthetic oligonucleotide"
actaatccgttgtcgacgggt

SEQ ID NO: 26232 - DNA, 21 bp, Artificial Sequence
  source: /note="Description of Artificial Sequence: Synthetic oligonucleotide"
actaatcctaataatgcgaat

SEQ ID NO: 26233 - DNA, 21 bp, Artificial Sequence
  source: /note="Description of Artificial Sequence: Synthetic oligonucleotide"
actaatcctcggtcgtatact

SEQ ID NO: 26234 - DNA, 21 bp, Artificial Sequence
  source: /note="Description of Artificial Sequence: Synthetic oligonucleotide"
acgaatccgagtgctcttggg

SEQ ID NO: 26235 - DNA, 21 bp, Artificial Sequence
  source: /note="Description of Artificial Sequence: Synthetic oligonucleotide"
acgaatccgtctatgtgtctg

SEQ ID NO: 26236 - DNA, 21 bp, Artificial Sequence
  source: /note="Description of Artificial Sequence: Synthetic oligonucleotide"
actaatcctactagtatggct

SEQ ID NO: 26237 - DNA, 21 bp, Artificial Sequence
  source: /note="Description of Artificial Sequence: Synthetic oligonucleotide"
acgaatcctgtgcttactgag

SEQ ID NO: 26238 - DNA, 21 bp, Artificial Sequence
  source: /note="Description of Artificial Sequence: Synthetic oligonucleotide"
actaatccggttaggcttgtt

SEQ ID NO: 26239 - DNA, 21 bp, Artificial Sequence
  source: /note="Description of Artificial Sequence: Synthetic oligonucleotide"
acgaatcctgttcggacgtct

SEQ ID NO: 26240 - DNA, 21 bp, Artificial Sequence
  source: /note="Description of Artificial Sequence: Synthetic oligonucleotide"
actaatcgtggttggactgat

SEQ ID NO: 26241 - DNA, 21 bp, Artificial Sequence
  source: /note="Description of Artificial Sequence: Synthetic oligonucleotide"
actaatcggaattcggaggtt

SEQ ID NO: 26242 - DNA, 21 bp, Artificial Sequence
  source: /note="Description of Artificial Sequence: Synthetic oligonucleotide"
acgaataggcctattgatact

SEQ ID NO: 26243 - DNA, 21 bp, Artificial Sequence
  source: /note="Description of Artificial Sequence: Synthetic oligonucleotide"
acgaataggcaggctagtacg

SEQ ID NO: 26244 - DNA, 21 bp, Artificial Sequence
  source: /note="Description of Artificial Sequence: Synthetic oligonucleotide"
actaatcggcaggatactcgg

SEQ ID NO: 26245 - DNA, 21 bp, Artificial Sequence
  source: /note="Description of Artificial Sequence: Synthetic oligonucleotide"
actaatagtgcgatttcgggt

SEQ ID NO: 26246 - DNA, 21 bp, Artificial Sequence
  source: /note="Description of Artificial Sequence: Synthetic oligonucleotide"
actaatagtggttctgatgct

SEQ ID NO: 26247 - DNA, 21 bp, Artificial Sequence
  source: /note="Description of Artificial Sequence: Synthetic oligonucleotide"
actaattctcatgcgatgctt

SEQ ID NO: 26248 - DNA, 21 bp, Artificial Sequence
  source: /note="Description of Artificial Sequence: Synthetic oligonucleotide"
acgaatagtttgcctgctctg

SEQ ID NO: 26249 - DNA, 21 bp, Artificial Sequence
  source: /note="Description of Artificial Sequence: Synthetic oligonucleotide"
actaattctatgggtgtgccg

SEQ ID NO: 26250 - DNA, 21 bp, Artificial Sequence
  source: /note="Description of Artificial Sequence: Synthetic oligonucleotide"
acgaatagtaatcatacgtat

SEQ ID NO: 26251 - DNA, 21 bp, Artificial Sequence
  source: /note="Description of Artificial Sequence: Synthetic oligonucleotide"
actaattcgccgtcgaggtct

SEQ ID NO: 26252 - DNA, 21 bp, Artificial Sequence
  source: /note="Description of Artificial Sequence: Synthetic oligonucleotide"
actaatactgatgttacgaag

SEQ ID NO: 26253 - DNA, 21 bp, Artificial Sequence
  source: /note="Description of Artificial Sequence: Synthetic oligonucleotide"
acgaatactcgtacgccttat

SEQ ID NO: 26254 - DNA, 21 bp, Artificial Sequence
  source: /note="Description of Artificial Sequence: Synthetic oligonucleotide"
actaatacttctgcgtcgagg

SEQ ID NO: 26255 - DNA, 21 bp, Artificial Sequence
  source: /note="Description of Artificial Sequence: Synthetic oligonucleotide"
actaatacgtcgtcgacttat

SEQ ID NO: 26256 - DNA, 21 bp, Artificial Sequence
  source: /note="Description of Artificial Sequence: Synthetic oligonucleotide"
actaatacgacgattaatctg

SEQ ID NO: 26257 - DNA, 21 bp, Artificial Sequence
  source: /note="Description of Artificial Sequence: Synthetic oligonucleotide"
acgaatacggttcggaatttt

SEQ ID NO: 26258 - DNA, 21 bp, Artificial Sequence
  source: /note="Description of Artificial Sequence: Synthetic oligonucleotide"
acgaatgttatgaaggcgggg

SEQ ID NO: 26259 - DNA, 21 bp, Artificial Sequence
  source: /note="Description of Artificial Sequence: Synthetic oligonucleotide"
acgaattataatgtggggagt

SEQ ID NO: 26260 - DNA, 21 bp, Artificial Sequence
  source: /note="Description of Artificial Sequence: Synthetic oligonucleotide"
acgaattatgttcttgcgccg

SEQ ID NO: 26261 - DNA, 21 bp, Artificial Sequence
  source: /note="Description of Artificial Sequence: Synthetic oligonucleotide"
acgcctgcttttaagattcag

SEQ ID NO: 26262 - DNA, 21 bp, Artificial Sequence
  source: /note="Description of Artificial Sequence: Synthetic oligonucleotide"
acgcctgctattgtgcctacg

SEQ ID NO: 26263 - DNA, 21 bp, Artificial Sequence
  source: /note="Description of Artificial Sequence: Synthetic oligonucleotide"
actccggctttgaatcggcct

SEQ ID NO: 26264 - DNA, 21 bp, Artificial Sequence
  source: /note="Description of Artificial Sequence: Synthetic oligonucleotide"
actccggcgaatgatccgcgt

SEQ ID NO: 26265 - DNA, 21 bp, Artificial Sequence
  source: /note="Description of Artificial Sequence: Synthetic oligonucleotide"
acgcctgctcctaataggttt

SEQ ID NO: 26266 - DNA, 21 bp, Artificial Sequence
  source: /note="Description of Artificial Sequence: Synthetic oligonucleotide"
acgccggcttcgccttcggat

SEQ ID NO: 26267 - DNA, 21 bp, Artificial Sequence
  source: /note="Description of Artificial Sequence: Synthetic oligonucleotide"
actccggctacgctgccgtct

SEQ ID NO: 26268 - DNA, 21 bp, Artificial Sequence
  source: /note="Description of Artificial Sequence: Synthetic oligonucleotide"
acgcctgcggtggagaagctt

SEQ ID NO: 26269 - DNA, 21 bp, Artificial Sequence
  source: /note="Description of Artificial Sequence: Synthetic oligonucleotide"
actccggcttatggtcggatt

SEQ ID NO: 26270 - DNA, 21 bp, Artificial Sequence
  source: /note="Description of Artificial Sequence: Synthetic oligonucleotide"
acgccggatatgccttttact

SEQ ID NO: 26271 - DNA, 21 bp, Artificial Sequence
  source: /note="Description of Artificial Sequence: Synthetic oligonucleotide"
actccggatcagtatgagttt

SEQ ID NO: 26272 - DNA, 21 bp, Artificial Sequence
  source: /note="Description of Artificial Sequence: Synthetic oligonucleotide"
actccggattctatgactgcg

SEQ ID NO: 26273 - DNA, 21 bp, Artificial Sequence
  source: /note="Description of Artificial Sequence: Synthetic oligonucleotide"
acgcctgagatgaagtctaat

SEQ ID NO: 26274 - DNA, 21 bp, Artificial Sequence
  source: /note="Description of Artificial Sequence: Synthetic oligonucleotide"
actcctgagagggcgatgtcg

SEQ ID NO: 26275 - DNA, 21 bp, Artificial Sequence
  source: /note="Description of Artificial Sequence: Synthetic oligonucleotide"
actcctgagacgaatcggccg

SEQ ID NO: 26276 - DNA, 21 bp, Artificial Sequence
  source: /note="Description of Artificial Sequence: Synthetic oligonucleotide"
actccgggtggtgctcggcct

SEQ ID NO: 26277 - DNA, 21 bp, Artificial Sequence
  source: /note="Description of Artificial Sequence: Synthetic oligonucleotide"
actccggggcatatggattct

SEQ ID NO: 26278 - DNA, 21 bp, Artificial Sequence
  source: /note="Description of Artificial Sequence: Synthetic oligonucleotide"
acgcctgggattcctaggtgt

SEQ ID NO: 26279 - DNA, 21 bp, Artificial Sequence
  source: /note="Description of Artificial Sequence: Synthetic oligonucleotide"
acgccggggcggcagtttcct

SEQ ID NO: 26280 - DNA, 21 bp, Artificial Sequence
  source: /note="Description of Artificial Sequence: Synthetic oligonucleotide"
actccgggtactattaatggt

SEQ ID NO: 26281 - DNA, 21 bp, Artificial Sequence
  source: /note="Description of Artificial Sequence: Synthetic oligonucleotide"
actccgcatggggtttcgccg

SEQ ID NO: 26282 - DNA, 21 bp, Artificial Sequence
  source: /note="Description of Artificial Sequence: Synthetic oligonucleotide"
actcctcatttggatgggcat

SEQ ID NO: 26283 - DNA, 21 bp, Artificial Sequence
  source: /note="Description of Artificial Sequence: Synthetic oligonucleotide"
acgccgcatactgggaatcag

SEQ ID NO: 26284 - DNA, 21 bp, Artificial Sequence
  source: /note="Description of Artificial Sequence: Synthetic oligonucleotide"
acgcctcatacgctggaggtg

SEQ ID NO: 26285 - DNA, 21 bp, Artificial Sequence
  source: /note="Description of Artificial Sequence: Synthetic oligonucleotide"
acgccgattgggcttccttct

SEQ ID NO: 26286 - DNA, 21 bp, Artificial Sequence
  source: /note="Description of Artificial Sequence: Synthetic oligonucleotide"
actcctattaggaatattcct

SEQ ID NO: 26287 - DNA, 21 bp, Artificial Sequence
  source: /note="Description of Artificial Sequence: Synthetic oligonucleotide"
acgccgatttcgatgccttct

SEQ ID NO: 26288 - DNA, 21 bp, Artificial Sequence
  source: /note="Description of Artificial Sequence: Synthetic oligonucleotide"
actcctattgtgcatattaat

SEQ ID NO: 26289 - DNA, 21 bp, Artificial Sequence
  source: /note="Description of Artificial Sequence: Synthetic oligonucleotide"
actcctattgttcatccgcgg

SEQ ID NO: 26290 - DNA, 21 bp, Artificial Sequence
  source: /note="Description of Artificial Sequence: Synthetic oligonucleotide"
actcctattgttaagcctgat

SEQ ID NO: 26291 - DNA, 21 bp, Artificial Sequence
  source: /note="Description of Artificial Sequence: Synthetic oligonucleotide"
actcctaaggatgctgaggtg

SEQ ID NO: 26292 - DNA, 21 bp, Artificial Sequence
  source: /note="Description of Artificial Sequence: Synthetic oligonucleotide"
actcctaagctttctgagcag

SEQ ID NO: 26293 - DNA, 21 bp, Artificial Sequence
  source: /note="Description of Artificial Sequence: Synthetic oligonucleotide"
actccgaagaatacgttggct

SEQ ID NO: 26294 - DNA, 21 bp, Artificial Sequence
  source: /note="Description of Artificial Sequence: Synthetic oligonucleotide"
acgcctaagtcggcttctggt

SEQ ID NO: 26295 - DNA, 21 bp, Artificial Sequence
  source: /note="Description of Artificial Sequence: Synthetic oligonucleotide"
acgcctcttgggggttcttct

SEQ ID NO: 26296 - DNA, 21 bp, Artificial Sequence
  source: /note="Description of Artificial Sequence: Synthetic oligonucleotide"
acgccgcttcattcgccgggt

SEQ ID NO: 26297 - DNA, 21 bp, Artificial Sequence
  source: /note="Description of Artificial Sequence: Synthetic oligonucleotide"
acgccgctgcatagtactacg

SEQ ID NO: 26298 - DNA, 21 bp, Artificial Sequence
  source: /note="Description of Artificial Sequence: Synthetic oligonucleotide"
acgccgcttttgtgtggtaag

SEQ ID NO: 26299 - DNA, 21 bp, Artificial Sequence
  source: /note="Description of Artificial Sequence: Synthetic oligonucleotide"
actccgcttctgtctcatagt

SEQ ID NO: 26300 - DNA, 21 bp, Artificial Sequence
  source: /note="Description of Artificial Sequence: Synthetic oligonucleotide"
actcctcttcagactacggtg

SEQ ID NO: 26301 - DNA, 21 bp, Artificial Sequence
  source: /note="Description of Artificial Sequence: Synthetic oligonucleotide"
acgccgttgaggtcgtctaat

SEQ ID NO: 26302 - DNA, 21 bp, Artificial Sequence
  source: /note="Description of Artificial Sequence: Synthetic oligonucleotide"
actccgctgtcggctattcag

SEQ ID NO: 26303 - DNA, 21 bp, Artificial Sequence
  source: /note="Description of Artificial Sequence: Synthetic oligonucleotide"
actcctttgactaatattgcg

SEQ ID NO: 26304 - DNA, 21 bp, Artificial Sequence
  source: /note="Description of Artificial Sequence: Synthetic oligonucleotide"
acgcctttgacgacggcgggg

SEQ ID NO: 26305 - DNA, 21 bp, Artificial Sequence
  source: /note="Description of Artificial Sequence: Synthetic oligonucleotide"
acgcctatggctgttgagagt

SEQ ID NO: 26306 - DNA, 21 bp, Artificial Sequence
  source: /note="Description of Artificial Sequence: Synthetic oligonucleotide"
actccgatggagatgattccg

SEQ ID NO: 26307 - DNA, 21 bp, Artificial Sequence
  source: /note="Description of Artificial Sequence: Synthetic oligonucleotide"
actcctatgggttcggggtgg

SEQ ID NO: 26308 - DNA, 21 bp, Artificial Sequence
  source: /note="Description of Artificial Sequence: Synthetic oligonucleotide"
actcctatgcaggttccggcg

SEQ ID NO: 26309 - DNA, 21 bp, Artificial Sequence
  source: /note="Description of Artificial Sequence: Synthetic oligonucleotide"
acgccgaatatgctttctgct

SEQ ID NO: 26310 - DNA, 21 bp, Artificial Sequence
  source: /note="Description of Artificial Sequence: Synthetic oligonucleotide"
actcctaatatggtgacgggt

SEQ ID NO: 26311 - DNA, 21 bp, Artificial Sequence
  source: /note="Description of Artificial Sequence: Synthetic oligonucleotide"
acgcctaattctcgtactgtg

SEQ ID NO: 26312 - DNA, 21 bp, Artificial Sequence
  source: /note="Description of Artificial Sequence: Synthetic oligonucleotide"
actcctaatgtgacttatcgt

SEQ ID NO: 26313 - DNA, 21 bp, Artificial Sequence
  source: /note="Description of Artificial Sequence: Synthetic oligonucleotide"
acgccgaattattatcatgag

SEQ ID NO: 26314 - DNA, 21 bp, Artificial Sequence
  source: /note="Description of Artificial Sequence: Synthetic oligonucleotide"
acgcctccggatggtactagg

SEQ ID NO: 26315 - DNA, 21 bp, Artificial Sequence
  source: /note="Description of Artificial Sequence: Synthetic oligonucleotide"
acgccgccggatcagtctagg

SEQ ID NO: 26316 - DNA, 21 bp, Artificial Sequence
  source: /note="Description of Artificial Sequence: Synthetic oligonucleotide"
actccgccgggtgagatgagg

SEQ ID NO: 26317 - DNA, 21 bp, Artificial Sequence
  source: /note="Description of Artificial Sequence: Synthetic oligonucleotide"
acgccgcctctgaaggcgtcg

SEQ ID NO: 26318 - DNA, 21 bp, Artificial Sequence
  source: /note="Description of Artificial Sequence: Synthetic oligonucleotide"
acgcctccgccgcctacttgg

SEQ ID NO: 26319 - DNA, 21 bp, Artificial Sequence
  source: /note="Description of Artificial Sequence: Synthetic oligonucleotide"
acgccgccgcgtggtattccg

SEQ ID NO: 26320 - DNA, 21 bp, Artificial Sequence
  source: /note="Description of Artificial Sequence: Synthetic oligonucleotide"
acgcctccgcgtactgtggtg

SEQ ID NO: 26321 - DNA, 21 bp, Artificial Sequence
  source: /note="Description of Artificial Sequence: Synthetic oligonucleotide"
actccgccttcgtctgagtgg

SEQ ID NO: 26322 - DNA, 21 bp, Artificial Sequence
  source: /note="Description of Artificial Sequence: Synthetic oligonucleotide"
actcctccgactgctacgcgt

SEQ ID NO: 26323 - DNA, 21 bp, Artificial Sequence
  source: /note="Description of Artificial Sequence: Synthetic oligonucleotide"
actcctccgactttgatggag

SEQ ID NO: 26324 - DNA, 21 bp, Artificial Sequence
  source: /note="Description of Artificial Sequence: Synthetic oligonucleotide"
actcctccttatgtggcgcag

SEQ ID NO: 26325 - DNA, 21 bp, Artificial Sequence
  source: /note="Description of Artificial Sequence: Synthetic oligonucleotide"
acgccgcagggtgatattgct

SEQ ID NO: 26326 - DNA, 21 bp, Artificial Sequence
  source: /note="Description of Artificial Sequence: Synthetic oligonucleotide"
actcctcagcatatgggtcct

SEQ ID NO: 26327 - DNA, 21 bp, Artificial Sequence
  source: /note="Description of Artificial Sequence: Synthetic oligonucleotide"
actcctcagcatatgaggggg

SEQ ID NO: 26328 - DNA, 21 bp, Artificial Sequence
  source: /note="Description of Artificial Sequence: Synthetic oligonucleotide"
acgcctcagatgccgtttcct

SEQ ID NO: 26329 - DNA, 21 bp, Artificial Sequence
  source: /note="Description of Artificial Sequence: Synthetic oligonucleotide"
actccgcagaatattatggat

SEQ ID NO: 26330 - DNA, 21 bp, Artificial Sequence
  source: /note="Description of Artificial Sequence: Synthetic oligonucleotide"
actccgcagcgggcggggatt

SEQ ID NO: 26331 - DNA, 21 bp, Artificial Sequence
  source: /note="Description of Artificial Sequence: Synthetic oligonucleotide"
acgcctagggctgagcatact

SEQ ID NO: 26332 - DNA, 21 bp, Artificial Sequence
  source: /note="Description of Artificial Sequence: Synthetic oligonucleotide"
acgcctaggggtcagagtctt

SEQ ID NO: 26333 - DNA, 21 bp, Artificial Sequence
  source: /note="Description of Artificial Sequence: Synthetic oligonucleotide"
actccgcggggtagtcttgat

SEQ ID NO: 26334 - DNA, 21 bp, Artificial Sequence
  source: /note="Description of Artificial Sequence: Synthetic oligonucleotide"
acgcctaggcttactgttgag

SEQ ID NO: 26335 - DNA, 21 bp, Artificial Sequence
  source: /note="Description of Artificial Sequence: Synthetic oligonucleotide"
actcctcggccgacgtatact

SEQ ID NO: 26336 - DNA, 21 bp, Artificial Sequence
  source: /note="Description of Artificial Sequence: Synthetic oligonucleotide"
actccgcgtacgcctagtagt

SEQ ID NO: 26337 - DNA, 21 bp, Artificial Sequence
  source: /note="Description of Artificial Sequence: Synthetic oligonucleotide"
acgcctagtgctgcgatgatt

SEQ ID NO: 26338 - DNA, 21 bp, Artificial Sequence
  source: /note="Description of Artificial Sequence: Synthetic oligonucleotide"
acgcctagtgcttctcggctt

SEQ ID NO: 26339 - DNA, 21 bp, Artificial Sequence
  source: /note="Description of Artificial Sequence: Synthetic oligonucleotide"
acgccgtctcatctgatgagt

SEQ ID NO: 26340 - DNA, 21 bp, Artificial Sequence
  source: /note="Description of Artificial Sequence: Synthetic oligonucleotide"
actcctagtaagggtcttgtg

SEQ ID NO: 26341 - DNA, 21 bp, Artificial Sequence
  source: /note="Description of Artificial Sequence: Synthetic oligonucleotide"
actccttctaatgatatttcg

SEQ ID NO: 26342 - DNA, 21 bp, Artificial Sequence
  source: /note="Description of Artificial Sequence: Synthetic oligonucleotide"
acgccgtcgaatcagtcttcg

SEQ ID NO: 26343 - DNA, 21 bp, Artificial Sequence
  source: /note="Description of Artificial Sequence: Synthetic oligonucleotide"
actccgtctccgggtgatgcg

SEQ ID NO: 26344 - DNA, 21 bp, Artificial Sequence
  source: /note="Description of Artificial Sequence: Synthetic oligonucleotide"
actccgagtcctcctggtgtg

SEQ ID NO: 26345 - DNA, 21 bp, Artificial Sequence
  source: /note="Description of Artificial Sequence: Synthetic oligonucleotide"
actcctagttcggctgggatt

SEQ ID NO: 26346 - DNA, 21 bp, Artificial Sequence
  source: /note="Description of Artificial Sequence: Synthetic oligonucleotide"
acgccttcttctggttcgcgg

SEQ ID NO: 26347 - DNA, 21 bp, Artificial Sequence
  source: /note="Description of Artificial Sequence: Synthetic oligonucleotide"
actccgagttctatgcatccg

SEQ ID NO: 26348 - DNA, 21 bp, Artificial Sequence
  source: /note="Description of Artificial Sequence: Synthetic oligonucleotide"
acgccttcttctactcagctt

SEQ ID NO: 26349 - DNA, 21 bp, Artificial Sequence
  source: /note="Description of Artificial Sequence: Synthetic oligonucleotide"
acgccgtctgttgatgcttgt

SEQ ID NO: 26350 - DNA, 21 bp, Artificial Sequence
  source: /note="Description of Artificial Sequence: Synthetic oligonucleotide"
acgccttctgttactcttctt

SEQ ID NO: 26351 - DNA, 21 bp, Artificial Sequence
  source: /note="Description of Artificial Sequence: Synthetic oligonucleotide"
acgccgtcttatgtgatggcg

SEQ ID NO: 26352 - DNA, 21 bp, Artificial Sequence
  source: /note="Description of Artificial Sequence: Synthetic oligonucleotide"
actccgactgcgcgtaatccg

SEQ ID NO: 26353 - DNA, 21 bp, Artificial Sequence
  source: /note="Description of Artificial Sequence: Synthetic oligonucleotide"
actcctactgagactaagtat

SEQ ID NO: 26354 - DNA, 21 bp, Artificial Sequence
  source: /note="Description of Artificial Sequence: Synthetic oligonucleotide"
acgcctactgggcgggatttt

SEQ ID NO: 26355 - DNA, 21 bp, Artificial Sequence
  source: /note="Description of Artificial Sequence: Synthetic oligonucleotide"
acgcctacgcttaagtcgaat

SEQ ID NO: 26356 - DNA, 21 bp, Artificial Sequence
  source: /note="Description of Artificial Sequence: Synthetic oligonucleotide"
actcctactcctgcgtttcgg

SEQ ID NO: 26357 - DNA, 21 bp, Artificial Sequence
  source: /note="Description of Artificial Sequence: Synthetic oligonucleotide"
acgccgactcggccttctgct

SEQ ID NO: 26358 - DNA, 21 bp, Artificial Sequence
  source: /note="Description of Artificial Sequence: Synthetic oligonucleotide"
acgcctacgtctagtgagtgg

SEQ ID NO: 26359 - DNA, 21 bp, Artificial Sequence
  source: /note="Description of Artificial Sequence: Synthetic oligonucleotide"
acgcctacgactagtaatgag

SEQ ID NO: 26360 - DNA, 21 bp, Artificial Sequence
  source: /note="Description of Artificial Sequence: Synthetic oligonucleotide"
actccgacggttccgcgtgat

SEQ ID NO: 26361 - DNA, 21 bp, Artificial Sequence
  source: /note="Description of Artificial Sequence: Synthetic oligonucleotide"
acgccggttttgaattatggt

SEQ ID NO: 26362 - DNA, 21 bp, Artificial Sequence
  source: /note="Description of Artificial Sequence: Synthetic oligonucleotide"
actcctgtgctttcgtctctg

SEQ ID NO: 26363 - DNA, 21 bp, Artificial Sequence
  source: /note="Description of Artificial Sequence: Synthetic oligonucleotide"
actcctgtgcaggcggttgct

SEQ ID NO: 26364 - DNA, 21 bp, Artificial Sequence
  source: /note="Description of Artificial Sequence: Synthetic oligonucleotide"
acgcctgttactattaatatg

SEQ ID NO: 26365 - DNA, 21 bp, Artificial Sequence
  source: /note="Description of Artificial Sequence: Synthetic oligonucleotide"
acgccttatccggatacttct

SEQ ID NO: 26366 - DNA, 21 bp, Artificial Sequence
  source: /note="Description of Artificial Sequence: Synthetic oligonucleotide"
actcaggctgctgcttatcgg

SEQ ID NO: 26367 - DNA, 21 bp, Artificial Sequence
  source: /note="Description of Artificial Sequence: Synthetic oligonucleotide"
actcaggctgggttttcgtct

SEQ ID NO: 26368 - DNA, 21 bp, Artificial Sequence
  source: /note="Description of Artificial Sequence: Synthetic oligonucleotide"
actcaggcgcattttgcgggt

SEQ ID NO: 26369 - DNA, 21 bp, Artificial Sequence
  source: /note="Description of Artificial Sequence: Synthetic oligonucleotide"
acgcaggattcgtttaggcat

SEQ ID NO: 26370 - DNA, 21 bp, Artificial Sequence
  source: /note="Description of Artificial Sequence: Synthetic oligonucleotide"
actcaggagctgccgcgttcg

SEQ ID NO: 26371 - DNA, 21 bp, Artificial Sequence
  source: /note="Description of Artificial Sequence: Synthetic oligonucleotide"
actcaggagaatgtggagagg

SEQ ID NO: 26372 - DNA, 21 bp, Artificial Sequence
  source: /note="Description of Artificial Sequence: Synthetic oligonucleotide"
actcaggaggttgagagggag

SEQ ID NO: 26373 - DNA, 21 bp, Artificial Sequence
  source: /note="Description of Artificial Sequence: Synthetic oligonucleotide"
actcagtttccggcgttgggg

SEQ ID NO: 26374 - DNA, 21 bp, Artificial Sequence
  source: /note="Description of Artificial Sequence: Synthetic oligonucleotide"
actcagtttactcataaggcg

SEQ ID NO: 26375 - DNA, 21 bp, Artificial Sequence
  source: /note="Description of Artificial Sequence: Synthetic oligonucleotide"
actcagggtgatgtttcttct

SEQ ID NO: 26376 - DNA, 21 bp, Artificial Sequence
  source: /note="Description of Artificial Sequence: Synthetic oligonucleotide"
acgcagggtctggatgttgag

SEQ ID NO: 26377 - DNA, 21 bp, Artificial Sequence
  source: /note="Description of Artificial Sequence: Synthetic oligonucleotide"
acgcagggtcaggctaatccg

SEQ ID NO: 26378 - DNA, 21 bp, Artificial Sequence
  source: /note="Description of Artificial Sequence: Synthetic oligonucleotide"
acgcagggtagggattatgtg

SEQ ID NO: 26379 - DNA, 21 bp, Artificial Sequence
  source: /note="Description of Artificial Sequence: Synthetic oligonucleotide"
actcagggtacgcgtgcttgg

SEQ ID NO: 26380 - DNA, 21 bp, Artificial Sequence
  source: /note="Description of Artificial Sequence: Synthetic oligonucleotide"
actcagcatgcggggggtttt

SEQ ID NO: 26381 - DNA, 21 bp, Artificial Sequence
  source: /note="Description of Artificial Sequence: Synthetic oligonucleotide"
acgcagattagtagtatgagt

SEQ ID NO: 26382 - DNA, 21 bp, Artificial Sequence
  source: /note="Description of Artificial Sequence: Synthetic oligonucleotide"
actcagattactgttgatgag

SEQ ID NO: 26383 - DNA, 21 bp, Artificial Sequence
  source: /note="Description of Artificial Sequence: Synthetic oligonucleotide"
actcagaagctttcgatgagt

SEQ ID NO: 26384 - DNA, 21 bp, Artificial Sequence
  source: /note="Description of Artificial Sequence: Synthetic oligonucleotide"
actcagaaggtgagtgatccg

SEQ ID NO: 26385 - DNA, 21 bp, Artificial Sequence
  source: /note="Description of Artificial Sequence: Synthetic oligonucleotide"
acgcagctgaatgttagtcgt

SEQ ID NO: 26386 - DNA, 21 bp, Artificial Sequence
  source: /note="Description of Artificial Sequence: Synthetic oligonucleotide"
actcagcttagtgtgaatccg

SEQ ID NO: 26387 - DNA, 21 bp, Artificial Sequence
  source: /note="Description of Artificial Sequence: Synthetic oligonucleotide"
actcagatgactaaggcttcg

SEQ ID NO: 26388 - DNA, 21 bp, Artificial Sequence
  source: /note="Description of Artificial Sequence: Synthetic oligonucleotide"
acgcagaatgagccgcatctg

SEQ ID NO: 26389 - DNA, 21 bp, Artificial Sequence
  source: /note="Description of Artificial Sequence: Synthetic oligonucleotide"
actcagaatctgtgtgatcgg

SEQ ID NO: 26390 - DNA, 21 bp, Artificial Sequence
  source: /note="Description of Artificial Sequence: Synthetic oligonucleotide"
acgcagcctccgctttcgcag

SEQ ID NO: 26391 - DNA, 21 bp, Artificial Sequence
  source: /note="Description of Artificial Sequence: Synthetic oligonucleotide"
actcagccgtctgctgctgcg

SEQ ID NO: 26392 - DNA, 21 bp, Artificial Sequence
  source: /note="Description of Artificial Sequence: Synthetic oligonucleotide"
acgcagcctagtttgcaggcg

SEQ ID NO: 26393 - DNA, 21 bp, Artificial Sequence
  source: /note="Description of Artificial Sequence: Synthetic oligonucleotide"
actcagccttctaggccgttg

SEQ ID NO: 26394 - DNA, 21 bp, Artificial Sequence
  source: /note="Description of Artificial Sequence: Synthetic oligonucleotide"
actcagcctactggttgtgag

SEQ ID NO: 26395 - DNA, 21 bp, Artificial Sequence
  source: /note="Description of Artificial Sequence: Synthetic oligonucleotide"
actcagccttatgggcatgcg

SEQ ID NO: 26396 - DNA, 21 bp, Artificial Sequence
  source: /note="Description of Artificial Sequence: Synthetic oligonucleotide"
acgcagcagtctactatttct

SEQ ID NO: 26397 - DNA, 21 bp, Artificial Sequence
  source: /note="Description of Artificial Sequence: Synthetic oligonucleotide"
actcagcagactccgaggggt

SEQ ID NO: 26398 - DNA, 21 bp, Artificial Sequence
  source: /note="Description of Artificial Sequence: Synthetic oligonucleotide"
actcagcagacgagtgcgtat

SEQ ID NO: 26399 - DNA, 21 bp, Artificial Sequence
  source: /note="Description of Artificial Sequence: Synthetic oligonucleotide"
acgcagcgggagacgaattcg

SEQ ID NO: 26400 - DNA, 21 bp, Artificial Sequence
  source: /note="Description of Artificial Sequence: Synthetic oligonucleotide"
actcagcgtgggtctgcggag

SEQ ID NO: 26401 - DNA, 21 bp, Artificial Sequence
  source: /note="Description of Artificial Sequence: Synthetic oligonucleotide"
actcagcggccgattacggtg

SEQ ID NO: 26402 - DNA, 21 bp, Artificial Sequence
  source: /note="Description of Artificial Sequence: Synthetic oligonucleotide"
actcagcgtgttgcgcgtgat

SEQ ID NO: 26403 - DNA, 21 bp, Artificial Sequence
  source: /note="Description of Artificial Sequence: Synthetic oligonucleotide"
acgcagtctgcgatgtctgtt

SEQ ID NO: 26404 - DNA, 21 bp, Artificial Sequence
  source: /note="Description of Artificial Sequence: Synthetic oligonucleotide"
acgcagtctgagactgttctt

SEQ ID NO: 26405 - DNA, 21 bp, Artificial Sequence
  source: /note="Description of Artificial Sequence: Synthetic oligonucleotide"
acgcagtcttttggttctgcg

SEQ ID NO: 26406 - DNA, 21 bp, Artificial Sequence
  source: /note="Description of Artificial Sequence: Synthetic oligonucleotide"
actcagtctctggcttctgag

SEQ ID NO: 26407 - DNA, 21 bp, Artificial Sequence
  source: /note="Description of Artificial Sequence: Synthetic oligonucleotide"
actcagtctttgatggatgat

SEQ ID NO: 26408 - DNA, 21 bp, Artificial Sequence
  source: /note="Description of Artificial Sequence: Synthetic oligonucleotide"
acgcagtcgcgtgatatgtcg

SEQ ID NO: 26409 - DNA, 21 bp, Artificial Sequence
  source: /note="Description of Artificial Sequence: Synthetic oligonucleotide"
acgcagtctagtgctctgtct

SEQ ID NO: 26410 - DNA, 21 bp, Artificial Sequence
  source: /note="Description of Artificial Sequence: Synthetic oligonucleotide"
actcagtctagtcagcggatt

SEQ ID NO: 26411 - DNA, 21 bp, Artificial Sequence
  source: /note="Description of Artificial Sequence: Synthetic oligonucleotide"
actcagtcttctactggtccg

SEQ ID NO: 26412 - DNA, 21 bp, Artificial Sequence
  source: /note="Description of Artificial Sequence: Synthetic oligonucleotide"
actcagtcgtctactcagcct

SEQ ID NO: 26413 - DNA, 21 bp, Artificial Sequence
  source: /note="Description of Artificial Sequence: Synthetic oligonucleotide"
actcagacgcgtccggttggt

SEQ ID NO: 26414 - DNA, 21 bp, Artificial Sequence
  source: /note="Description of Artificial Sequence: Synthetic oligonucleotide"
actcagacgactattatgcct

SEQ ID NO: 26415 - DNA, 21 bp, Artificial Sequence
  source: /note="Description of Artificial Sequence: Synthetic oligonucleotide"
acgcagactactagtctgtat

SEQ ID NO: 26416 - DNA, 21 bp, Artificial Sequence
  source: /note="Description of Artificial Sequence: Synthetic oligonucleotide"
acgcagacgacttctccggtt

SEQ ID NO: 26417 - DNA, 21 bp, Artificial Sequence
  source: /note="Description of Artificial Sequence: Synthetic oligonucleotide"
acgcaggttgcgcttaggccg

SEQ ID NO: 26418 - DNA, 21 bp, Artificial Sequence
  source: /note="Description of Artificial Sequence: Synthetic oligonucleotide"
acgcaggtggcgacgtatcag

SEQ ID NO: 26419 - DNA, 21 bp, Artificial Sequence
  source: /note="Description of Artificial Sequence: Synthetic oligonucleotide"
acgcagtggttggcgcagggt

SEQ ID NO: 26420 - DNA, 21 bp, Artificial Sequence
  source: /note="Description of Artificial Sequence: Synthetic oligonucleotide"
acgcgtgcggctctggggacg

SEQ ID NO: 26421 - DNA, 21 bp, Artificial Sequence
  source: /note="Description of Artificial Sequence: Synthetic oligonucleotide"
acgagggcgttgcaggctggg

SEQ ID NO: 26422 - DNA, 21 bp, Artificial Sequence
  source: /note="Description of Artificial Sequence: Synthetic oligonucleotide"
acgcgggcgaatgcgacgaat

SEQ ID NO: 26423 - DNA, 21 bp, Artificial Sequence
  source: /note="Description of Artificial Sequence: Synthetic oligonucleotide"
actagggcgccggcgactatg

SEQ ID NO: 26424 - DNA, 21 bp, Artificial Sequence
  source: /note="Description of Artificial Sequence: Synthetic oligonucleotide"
acgcgtgcttcgactgcgaat

SEQ ID NO: 26425 - DNA, 21 bp, Artificial Sequence
  source: /note="Description of Artificial Sequence: Synthetic oligonucleotide"
acgcgggcgacgggtgatgct

SEQ ID NO: 26426 - DNA, 21 bp, Artificial Sequence
  source: /note="Description of Artificial Sequence: Synthetic oligonucleotide"
acgcgggctgtggatgggcgt

SEQ ID NO: 26427 - DNA, 21 bp, Artificial Sequence
  source: /note="Description of Artificial Sequence: Synthetic oligonucleotide"
actcgggctgtggggggtcag

SEQ ID NO: 26428 - DNA, 21 bp, Artificial Sequence
  source: /note="Description of Artificial Sequence: Synthetic oligonucleotide"
actagggatgagtgggctacg

SEQ ID NO: 26429 - DNA, 21 bp, Artificial Sequence
  source: /note="Description of Artificial Sequence: Synthetic oligonucleotide"
actagggatcgtgggccttct

SEQ ID NO: 26430 - DNA, 21 bp, Artificial Sequence
  source: /note="Description of Artificial Sequence: Synthetic oligonucleotide"
actcgtgatacttcgtatact

SEQ ID NO: 26431 - DNA, 21 bp, Artificial Sequence
  source: /note="Description of Artificial Sequence: Synthetic oligonucleotide"
actcgtgagggttttatggtt

SEQ ID NO: 26432 - DNA, 21 bp, Artificial Sequence
  source: /note="Description of Artificial Sequence: Synthetic oligonucleotide"
actcgggagatggggccgagt

SEQ ID NO: 26433 - DNA, 21 bp, Artificial Sequence
  source: /note="Description of Artificial Sequence: Synthetic oligonucleotide"
actcgtgagactgtgcctgcg

SEQ ID NO: 26434 - DNA, 21 bp, Artificial Sequence
  source: /note="Description of Artificial Sequence: Synthetic oligonucleotide"
acgcggttttgttcgtctcct

SEQ ID NO: 26435 - DNA, 21 bp, Artificial Sequence
  source: /note="Description of Artificial Sequence: Synthetic oligonucleotide"
actcgttttgagaagtatgat

SEQ ID NO: 26436 - DNA, 21 bp, Artificial Sequence
  source: /note="Description of Artificial Sequence: Synthetic oligonucleotide"
acgcgttttcaggttgaggtt

SEQ ID NO: 26437 - DNA, 21 bp, Artificial Sequence
  source: /note="Description of Artificial Sequence: Synthetic oligonucleotide"
acgcggggtggggatggtgtg

SEQ ID NO: 26438 - DNA, 21 bp, Artificial Sequence
  source: /note="Description of Artificial Sequence: Synthetic oligonucleotide"
actagggggacggatttgtcg

SEQ ID NO: 26439 - DNA, 21 bp, Artificial Sequence
  source: /note="Description of Artificial Sequence: Synthetic oligonucleotide"
actcgtgggacttcggtgtcg

SEQ ID NO: 26440 - DNA, 21 bp, Artificial Sequence
  source: /note="Description of Artificial Sequence: Synthetic oligonucleotide"
actcgtggtgtgattaatgcg

SEQ ID NO: 26441 - DNA, 21 bp, Artificial Sequence
  source: /note="Description of Artificial Sequence: Synthetic oligonucleotide"
acgcggcatgattttttgaat

SEQ ID NO: 26442 - DNA, 21 bp, Artificial Sequence
  source: /note="Description of Artificial Sequence: Synthetic oligonucleotide"
actcggattggtcctagtgag

SEQ ID NO: 26443 - DNA, 21 bp, Artificial Sequence
  source: /note="Description of Artificial Sequence: Synthetic oligonucleotide"
acgaggattcatgctttgcct

SEQ ID NO: 26444 - DNA, 21 bp, Artificial Sequence
  source: /note="Description of Artificial Sequence: Synthetic oligonucleotide"
acgaggatttctcttagtggg

SEQ ID NO: 26445 - DNA, 21 bp, Artificial Sequence
  source: /note="Description of Artificial Sequence: Synthetic oligonucleotide"
actcggaagctggctgttgat

SEQ ID NO: 26446 - DNA, 21 bp, Artificial Sequence
  source: /note="Description of Artificial Sequence: Synthetic oligonucleotide"
acgcgtcttaattctattgat

SEQ ID NO: 26447 - DNA, 21 bp, Artificial Sequence
  source: /note="Description of Artificial Sequence: Synthetic oligonucleotide"
acgcggctgccgacgtcgctg

SEQ ID NO: 26448 - DNA, 21 bp, Artificial Sequence
  source: /note="Description of Artificial Sequence: Synthetic oligonucleotide"
actaggcttcagactagtgct

SEQ ID NO: 26449 - DNA, 21 bp, Artificial Sequence
  source: /note="Description of Artificial Sequence: Synthetic oligonucleotide"
actaggcttagtgagaatact

SEQ ID NO: 26450 - DNA, 21 bp, Artificial Sequence
  source: /note="Description of Artificial Sequence: Synthetic oligonucleotide"
acgcgtctgtcgtcttctgtg

SEQ ID NO: 26451 - DNA, 21 bp, Artificial Sequence
  source: /note="Description of Artificial Sequence: Synthetic oligonucleotide"
actcggatggcttcggatggg

SEQ ID NO: 26452 - DNA, 21 bp, Artificial Sequence
  source: /note="Description of Artificial Sequence: Synthetic oligonucleotide"
actcggatgccgagtggggtg

SEQ ID NO: 26453 - DNA, 21 bp, Artificial Sequence
  source: /note="Description of Artificial Sequence: Synthetic oligonucleotide"
actaggatgcctgttattagt

SEQ ID NO: 26454 - DNA, 21 bp, Artificial Sequence
  source: /note="Description of Artificial Sequence: Synthetic oligonucleotide"
acgcgtaatgagtattctttt

SEQ ID NO: 26455 - DNA, 21 bp, Artificial Sequence
  source: /note="Description of Artificial Sequence: Synthetic oligonucleotide"
acgaggaatctggattctgtt

SEQ ID NO: 26456 - DNA, 21 bp, Artificial Sequence
  source: /note="Description of Artificial Sequence: Synthetic oligonucleotide"
actcgtaatatgtctgatact

SEQ ID NO: 26457 - DNA, 21 bp, Artificial Sequence
  source: /note="Description of Artificial Sequence: Synthetic oligonucleotide"
acgaggaataatcatgtgacg

SEQ ID NO: 26458 - DNA, 21 bp, Artificial Sequence
  source: /note="Description of Artificial Sequence: Synthetic oligonucleotide"
acgcggaatcctgagccgaag

SEQ ID NO: 26459 - DNA, 21 bp, Artificial Sequence
  source: /note="Description of Artificial Sequence: Synthetic oligonucleotide"
acgaggaatcctgagtcgacg

SEQ ID NO: 26460 - DNA, 21 bp, Artificial Sequence
  source: /note="Description of Artificial Sequence: Synthetic oligonucleotide"
actcgtaatcctggtactacg

SEQ ID NO: 26461 - DNA, 21 bp, Artificial Sequence
  source: /note="Description of Artificial Sequence: Synthetic oligonucleotide"
actcgtaatcagcttcgggat

SEQ ID NO: 26462 - DNA, 21 bp, Artificial Sequence
  source: /note="Description of Artificial Sequence: Synthetic oligonucleotide"
actcgtaatagtggtatggcg

SEQ ID NO: 26463 - DNA, 21 bp, Artificial Sequence
  source: /note="Description of Artificial Sequence: Synthetic oligonucleotide"
acgcggaatactactgaggct

SEQ ID NO: 26464 - DNA, 21 bp, Artificial Sequence
  source: /note="Description of Artificial Sequence: Synthetic oligonucleotide"
actcgtcctgctccgatggct

SEQ ID NO: 26465 - DNA, 21 bp, Artificial Sequence
  source: /note="Description of Artificial Sequence: Synthetic oligonucleotide"
actcgtcctgattcgctgccg

SEQ ID NO: 26466 - DNA, 21 bp, Artificial Sequence
  source: /note="Description of Artificial Sequence: Synthetic oligonucleotide"
acgcggccgggtgttgatacg

SEQ ID NO: 26467 - DNA, 21 bp, Artificial Sequence
  source: /note="Description of Artificial Sequence: Synthetic oligonucleotide"
actcggcctttggctattgct

SEQ ID NO: 26468 - DNA, 21 bp, Artificial Sequence
  source: /note="Description of Artificial Sequence: Synthetic oligonucleotide"
actaggccgttgccgtcgaat

SEQ ID NO: 26469 - DNA, 21 bp, Artificial Sequence
  source: /note="Description of Artificial Sequence: Synthetic oligonucleotide"
actcgtcctctgagttctggg

SEQ ID NO: 26470 - DNA, 21 bp, Artificial Sequence
  source: /note="Description of Artificial Sequence: Synthetic oligonucleotide"
actaggcctttgagttcgcct

SEQ ID NO: 26471 - DNA, 21 bp, Artificial Sequence
  source: /note="Description of Artificial Sequence: Synthetic oligonucleotide"
acgcgtcctatggagtctgcg

SEQ ID NO: 26472 - DNA, 21 bp, Artificial Sequence
  source: /note="Description of Artificial Sequence: Synthetic oligonucleotide"
actaggccgaatttgccttat

SEQ ID NO: 26473 - DNA, 21 bp, Artificial Sequence
  source: /note="Description of Artificial Sequence: Synthetic oligonucleotide"
acgaggccttctgaggctcag

SEQ ID NO: 26474 - DNA, 21 bp, Artificial Sequence
  source: /note="Description of Artificial Sequence: Synthetic oligonucleotide"
actcgtccttcttatgagatg

SEQ ID NO: 26475 - DNA, 21 bp, Artificial Sequence
  source: /note="Description of Artificial Sequence: Synthetic oligonucleotide"
actaggccgacggctgatgat

SEQ ID NO: 26476 - DNA, 21 bp, Artificial Sequence
  source: /note="Description of Artificial Sequence: Synthetic oligonucleotide"
acgaggcctactccgcttttg

SEQ ID NO: 26477 - DNA, 21 bp, Artificial Sequence
  source: /note="Description of Artificial Sequence: Synthetic oligonucleotide"
actcgtccggtggggacgtcg

SEQ ID NO: 26478 - DNA, 21 bp, Artificial Sequence
  source: /note="Description of Artificial Sequence: Synthetic oligonucleotide"
acgcgtcctgtttatgctgat

SEQ ID NO: 26479 - DNA, 21 bp, Artificial Sequence
  source: /note="Description of Artificial Sequence: Synthetic oligonucleotide"
actaggcaggctacgtctgag

SEQ ID NO: 26480 - DNA, 21 bp, Artificial Sequence
  source: /note="Description of Artificial Sequence: Synthetic oligonucleotide"
acgcgtcagcttctgactgcg

SEQ ID NO: 26481 - DNA, 21 bp, Artificial Sequence
  source: /note="Description of Artificial Sequence: Synthetic oligonucleotide"
acgcgtcagtatacgaatagt

SEQ ID NO: 26482 - DNA, 21 bp, Artificial Sequence
  source: /note="Description of Artificial Sequence: Synthetic oligonucleotide"
acgaggcgtcctgatattgcg

SEQ ID NO: 26483 - DNA, 21 bp, Artificial Sequence
  source: /note="Description of Artificial Sequence: Synthetic oligonucleotide"
acgcggcgtgtgccgtcggag

SEQ ID NO: 26484 - DNA, 21 bp, Artificial Sequence
  source: /note="Description of Artificial Sequence: Synthetic oligonucleotide"
actcgttctgcgcttgagttg

SEQ ID NO: 26485 - DNA, 21 bp, Artificial Sequence
  source: /note="Description of Artificial Sequence: Synthetic oligonucleotide"
actcgttctgcggtggggtct

SEQ ID NO: 26486 - DNA, 21 bp, Artificial Sequence
  source: /note="Description of Artificial Sequence: Synthetic oligonucleotide"
acgaggtcttttgagagttcg

SEQ ID NO: 26487 - DNA, 21 bp, Artificial Sequence
  source: /note="Description of Artificial Sequence: Synthetic oligonucleotide"
actaggtcgggtcttattgag

SEQ ID NO: 26488 - DNA, 21 bp, Artificial Sequence
  source: /note="Description of Artificial Sequence: Synthetic oligonucleotide"
acgaggtctgggactgatctt

SEQ ID NO: 26489 - DNA, 21 bp, Artificial Sequence
  source: /note="Description of Artificial Sequence: Synthetic oligonucleotide"
actcggtctatggtgactctt

SEQ ID NO: 26490 - DNA, 21 bp, Artificial Sequence
  source: /note="Description of Artificial Sequence: Synthetic oligonucleotide"
acgcgttctaatgagactgtt

SEQ ID NO: 26491 - DNA, 21 bp, Artificial Sequence
  source: /note="Description of Artificial Sequence: Synthetic oligonucleotide"
acgcggtcgaatggtctgacg

SEQ ID NO: 26492 - DNA, 21 bp, Artificial Sequence
  source: /note="Description of Artificial Sequence: Synthetic oligonucleotide"
actaggtctaataattcgact

SEQ ID NO: 26493 - DNA, 21 bp, Artificial Sequence
  source: /note="Description of Artificial Sequence: Synthetic oligonucleotide"
actaggagtccttctagttat

SEQ ID NO: 26494 - DNA, 21 bp, Artificial Sequence
  source: /note="Description of Artificial Sequence: Synthetic oligonucleotide"
actcgttctcagcatgagtct

SEQ ID NO: 26495 - DNA, 21 bp, Artificial Sequence
  source: /note="Description of Artificial Sequence: Synthetic oligonucleotide"
acgaggtctcagagtcctatg

SEQ ID NO: 26496 - DNA, 21 bp, Artificial Sequence
  source: /note="Description of Artificial Sequence: Synthetic oligonucleotide"
acgcggagttcgttgacgccg

SEQ ID NO: 26497 - DNA, 21 bp, Artificial Sequence
  source: /note="Description of Artificial Sequence: Synthetic oligonucleotide"
actaggtcgtcgtcgattctg

SEQ ID NO: 26498 - DNA, 21 bp, Artificial Sequence
  source: /note="Description of Artificial Sequence: Synthetic oligonucleotide"
actcggagtacggcttctcct

SEQ ID NO: 26499 - DNA, 21 bp, Artificial Sequence
  source: /note="Description of Artificial Sequence: Synthetic oligonucleotide"
actaggagtacgcctatttat

SEQ ID NO: 26500 - DNA, 21 bp, Artificial Sequence
  source: /note="Description of Artificial Sequence: Synthetic oligonucleotide"
acgaggtcggtggagcttctt

SEQ ID NO: 26501 - DNA, 21 bp, Artificial Sequence
  source: /note="Description of Artificial Sequence: Synthetic oligonucleotide"
actaggactattacgccgctt

SEQ ID NO: 26502 - DNA, 21 bp, Artificial Sequence
  source: /note="Description of Artificial Sequence: Synthetic oligonucleotide"
acgcggactttgacttcgtcg

SEQ ID NO: 26503 - DNA, 21 bp, Artificial Sequence
  source: /note="Description of Artificial Sequence: Synthetic oligonucleotide"
actaggactatgtcgatgtct

SEQ ID NO: 26504 - DNA, 21 bp, Artificial Sequence
  source: /note="Description of Artificial Sequence: Synthetic oligonucleotide"
acgcggacgaatagtattatt

SEQ ID NO: 26505 - DNA, 21 bp, Artificial Sequence
  source: /note="Description of Artificial Sequence: Synthetic oligonucleotide"
acgcggacgcgtcttggggat

SEQ ID NO: 26506 - DNA, 21 bp, Artificial Sequence
  source: /note="Description of Artificial Sequence: Synthetic oligonucleotide"
acgcgtacgtcggattttcct

SEQ ID NO: 26507 - DNA, 21 bp, Artificial Sequence
  source: /note="Description of Artificial Sequence: Synthetic oligonucleotide"
actcggacgtctcatgctctt

SEQ ID NO: 26508 - DNA, 21 bp, Artificial Sequence
  source: /note="Description of Artificial Sequence: Synthetic oligonucleotide"
actcgtacgtcgcagcctagt

SEQ ID NO: 26509 - DNA, 21 bp, Artificial Sequence
  source: /note="Description of Artificial Sequence: Synthetic oligonucleotide"
actaggacttctactggttct

SEQ ID NO: 26510 - DNA, 21 bp, Artificial Sequence
  source: /note="Description of Artificial Sequence: Synthetic oligonucleotide"
acgcggactactgggtcgatg

SEQ ID NO: 26511 - DNA, 21 bp, Artificial Sequence
  source: /note="Description of Artificial Sequence: Synthetic oligonucleotide"
acgaggactacgttggagagt

SEQ ID NO: 26512 - DNA, 21 bp, Artificial Sequence
  source: /note="Description of Artificial Sequence: Synthetic oligonucleotide"
actcgtactacgacggttact

SEQ ID NO: 26513 - DNA, 21 bp, Artificial Sequence
  source: /note="Description of Artificial Sequence: Synthetic oligonucleotide"
actaggacggtggctacttat

SEQ ID NO: 26514 - DNA, 21 bp, Artificial Sequence
  source: /note="Description of Artificial Sequence: Synthetic oligonucleotide"
actcgtacggttcagctgggt

SEQ ID NO: 26515 - DNA, 21 bp, Artificial Sequence
  source: /note="Description of Artificial Sequence: Synthetic oligonucleotide"
actagggtgcatggtgttagt

SEQ ID NO: 26516 - DNA, 21 bp, Artificial Sequence
  source: /note="Description of Artificial Sequence: Synthetic oligonucleotide"
actagggttattatgaatgat

SEQ ID NO: 26517 - DNA, 21 bp, Artificial Sequence
  source: /note="Description of Artificial Sequence: Synthetic oligonucleotide"
acgagggtgagtagtattcct

SEQ ID NO: 26518 - DNA, 21 bp, Artificial Sequence
  source: /note="Description of Artificial Sequence: Synthetic oligonucleotide"
actcgtgttacggctcctttg

SEQ ID NO: 26519 - DNA, 21 bp, Artificial Sequence
  source: /note="Description of Artificial Sequence: Synthetic oligonucleotide"
acgcgtgtgtatccggcgggt

SEQ ID NO: 26520 - DNA, 21 bp, Artificial Sequence
  source: /note="Description of Artificial Sequence: Synthetic oligonucleotide"
acttctgctgggcttaattat

SEQ ID NO: 26521 - DNA, 21 bp, Artificial Sequence
  source: /note="Description of Artificial Sequence: Synthetic oligonucleotide"
acgtcggctggggtttataag

SEQ ID NO: 26522 - DNA, 21 bp, Artificial Sequence
  source: /note="Description of Artificial Sequence: Synthetic oligonucleotide"
acttctgcgaagcatacgatg

SEQ ID NO: 26523 - DNA, 21 bp, Artificial Sequence
  source: /note="Description of Artificial Sequence: Synthetic oligonucleotide"
acgtcggcgctgatttttgag

SEQ ID NO: 26524 - DNA, 21 bp, Artificial Sequence
  source: /note="Description of Artificial Sequence: Synthetic oligonucleotide"
actagtgctcagtctgggccg

SEQ ID NO: 26525 - DNA, 21 bp, Artificial Sequence
  source: /note="Description of Artificial Sequence: Synthetic oligonucleotide"
acttcggcgcgtccttttttg

SEQ ID NO: 26526 - DNA, 21 bp, Artificial Sequence
  source: /note="Description of Artificial Sequence: Synthetic oligonucleotide"
acgtctgcgaggcctgtgggg

SEQ ID NO: 26527 - DNA, 21 bp, Artificial Sequence
  source: /note="Description of Artificial Sequence: Synthetic oligonucleotide"
acttctgcgtctattcctccg

SEQ ID NO: 26528 - DNA, 21 bp, Artificial Sequence
  source: /note="Description of Artificial Sequence: Synthetic oligonucleotide"
acgtctgcgagttctactact

SEQ ID NO: 26529 - DNA, 21 bp, Artificial Sequence
  source: /note="Description of Artificial Sequence: Synthetic oligonucleotide"
acttcggatctgccgcttaat

SEQ ID NO: 26530 - DNA, 21 bp, Artificial Sequence
  source: /note="Description of Artificial Sequence: Synthetic oligonucleotide"
acgtctgatttgcgtgggcgt

SEQ ID NO: 26531 - DNA, 21 bp, Artificial Sequence
  source: /note="Description of Artificial Sequence: Synthetic oligonucleotide"
acgagtgataatatgcctcat

SEQ ID NO: 26532 - DNA, 21 bp, Artificial Sequence
  source: /note="Description of Artificial Sequence: Synthetic oligonucleotide"
acttcggatccgtgtatgagt

SEQ ID NO: 26533 - DNA, 21 bp, Artificial Sequence
  source: /note="Description of Artificial Sequence: Synthetic oligonucleotide"
actagtgattcggctgttacg

SEQ ID NO: 26534 - DNA, 21 bp, Artificial Sequence
  source: /note="Description of Artificial Sequence: Synthetic oligonucleotide"
acttctgatgtgcttcttacg

SEQ ID NO: 26535 - DNA, 21 bp, Artificial Sequence
  source: /note="Description of Artificial Sequence: Synthetic oligonucleotide"
actagtgagtctaaggcgcat

SEQ ID NO: 26536 - DNA, 21 bp, Artificial Sequence
  source: /note="Description of Artificial Sequence: Synthetic oligonucleotide"
acgagtgagtcttggccttct

SEQ ID NO: 26537 - DNA, 21 bp, Artificial Sequence
  source: /note="Description of Artificial Sequence: Synthetic oligonucleotide"
acttcttttggtccttcttcg

SEQ ID NO: 26538 - DNA, 21 bp, Artificial Sequence
  source: /note="Description of Artificial Sequence: Synthetic oligonucleotide"
acttcgtttctgaagacgtct

SEQ ID NO: 26539 - DNA, 21 bp, Artificial Sequence
  source: /note="Description of Artificial Sequence: Synthetic oligonucleotide"
actagttttccttcgtcggct

SEQ ID NO: 26540 - DNA, 21 bp, Artificial Sequence
  source: /note="Description of Artificial Sequence: Synthetic oligonucleotide"
acgagttttcggctggatgag

SEQ ID NO: 26541 - DNA, 21 bp, Artificial Sequence
  source: /note="Description of Artificial Sequence: Synthetic oligonucleotide"
acgtcgttttctcagtcgacg

SEQ ID NO: 26542 - DNA, 21 bp, Artificial Sequence
  source: /note="Description of Artificial Sequence: Synthetic oligonucleotide"
acgtcgttttcgcgtggtctg

SEQ ID NO: 26543 - DNA, 21 bp, Artificial Sequence
  source: /note="Description of Artificial Sequence: Synthetic oligonucleotide"
acgagtggtcatcatattctg

SEQ ID NO: 26544 - DNA, 21 bp, Artificial Sequence
  source: /note="Description of Artificial Sequence: Synthetic oligonucleotide"
acgtcggggctgcctgaggct

SEQ ID NO: 26545 - DNA, 21 bp, Artificial Sequence
  source: /note="Description of Artificial Sequence: Synthetic oligonucleotide"
acttctggtctgtcggaggtg

SEQ ID NO: 26546 - DNA, 21 bp, Artificial Sequence
  source: /note="Description of Artificial Sequence: Synthetic oligonucleotide"
acttctgggcttactcttggg

SEQ ID NO: 26547 - DNA, 21 bp, Artificial Sequence
  source: /note="Description of Artificial Sequence: Synthetic oligonucleotide"
acttcggggccgagtcatggg

SEQ ID NO: 26548 - DNA, 21 bp, Artificial Sequence
  source: /note="Description of Artificial Sequence: Synthetic oligonucleotide"
acttctgggcggtcgcctacg

SEQ ID NO: 26549 - DNA, 21 bp, Artificial Sequence
  source: /note="Description of Artificial Sequence: Synthetic oligonucleotide"
acgagtgggtcgcttaggcct

SEQ ID NO: 26550 - DNA, 21 bp, Artificial Sequence
  source: /note="Description of Artificial Sequence: Synthetic oligonucleotide"
actagtgggtcgactagtggt

SEQ ID NO: 26551 - DNA, 21 bp, Artificial Sequence
  source: /note="Description of Artificial Sequence: Synthetic oligonucleotide"
acgtctggtacgttgtcgact

SEQ ID NO: 26552 - DNA, 21 bp, Artificial Sequence
  source: /note="Description of Artificial Sequence: Synthetic oligonucleotide"
acgagtgggacgagtacggat

SEQ ID NO: 26553 - DNA, 21 bp, Artificial Sequence
  source: /note="Description of Artificial Sequence: Synthetic oligonucleotide"
actagtcatggtccggctact

SEQ ID NO: 26554 - DNA, 21 bp, Artificial Sequence
  source: /note="Description of Artificial Sequence: Synthetic oligonucleotide"
acgagtcataatgggttttct

SEQ ID NO: 26555 - DNA, 21 bp, Artificial Sequence
  source: /note="Description of Artificial Sequence: Synthetic oligonucleotide"
actagtcatcgtcctcagcct

SEQ ID NO: 26556 - DNA, 21 bp, Artificial Sequence
  source: /note="Description of Artificial Sequence: Synthetic oligonucleotide"
acttcgattgggcctaggatt

SEQ ID NO: 26557 - DNA, 21 bp, Artificial Sequence
  source: /note="Description of Artificial Sequence: Synthetic oligonucleotide"
acgtctattaatcgtttgcct

SEQ ID NO: 26558 - DNA, 21 bp, Artificial Sequence
  source: /note="Description of Artificial Sequence: Synthetic oligonucleotide"
acttcgaaggatggtcatcct

SEQ ID NO: 26559 - DNA, 21 bp, Artificial Sequence
  source: /note="Description of Artificial Sequence: Synthetic oligonucleotide"
acttctaagttgtcgtgtccg

SEQ ID NO: 26560 - DNA, 21 bp, Artificial Sequence
  source: /note="Description of Artificial Sequence: Synthetic oligonucleotide"
acgtcgaagacgccttctatt

SEQ ID NO: 26561 - DNA, 21 bp, Artificial Sequence
  source: /note="Description of Artificial Sequence: Synthetic oligonucleotide"
actagtaaggttgctacgatt

SEQ ID NO: 26562 - DNA, 21 bp, Artificial Sequence
  source: /note="Description of Artificial Sequence: Synthetic oligonucleotide"
acttctaagtggctgactccg

SEQ ID NO: 26563 - DNA, 21 bp, Artificial Sequence
  source: /note="Description of Artificial Sequence: Synthetic oligonucleotide"
acgtcgcttgatgctcggtct

SEQ ID NO: 26564 - DNA, 21 bp, Artificial Sequence
  source: /note="Description of Artificial Sequence: Synthetic oligonucleotide"
acttcgcttgggagtgtgtcg

SEQ ID NO: 26565 - DNA, 21 bp, Artificial Sequence
  source: /note="Description of Artificial Sequence: Synthetic oligonucleotide"
acgtcgcttcattctggtgat

SEQ ID NO: 26566 - DNA, 21 bp, Artificial Sequence
  source: /note="Description of Artificial Sequence: Synthetic oligonucleotide"
acgagtctgaataatcggttg

SEQ ID NO: 26567 - DNA, 21 bp, Artificial Sequence
  source: /note="Description of Artificial Sequence: Synthetic oligonucleotide"
acttcgttgcggattatgccg

SEQ ID NO: 26568 - DNA, 21 bp, Artificial Sequence
  source: /note="Description of Artificial Sequence: Synthetic oligonucleotide"
acttctcttcggatgaatggt

SEQ ID NO: 26569 - DNA, 21 bp, Artificial Sequence
  source: /note="Description of Artificial Sequence: Synthetic oligonucleotide"
acgtcgcttcggagtgatcct

SEQ ID NO: 26570 - DNA, 21 bp, Artificial Sequence
  source: /note="Description of Artificial Sequence: Synthetic oligonucleotide"
acttctttgtcgcttgctttg

SEQ ID NO: 26571 - DNA, 21 bp, Artificial Sequence
  source: /note="Description of Artificial Sequence: Synthetic oligonucleotide"
acgagtttgactcctgtttct

SEQ ID NO: 26572 - DNA, 21 bp, Artificial Sequence
  source: /note="Description of Artificial Sequence: Synthetic oligonucleotide"
acgtctttggtttttgctgtg

SEQ ID NO: 26573 - DNA, 21 bp, Artificial Sequence
  source: /note="Description of Artificial Sequence: Synthetic oligonucleotide"
acgtcgatgaatctgcctgat

SEQ ID NO: 26574 - DNA, 21 bp, Artificial Sequence
  source: /note="Description of Artificial Sequence: Synthetic oligonucleotide"
acgagtatgaggacggagttg

SEQ ID NO: 26575 - DNA, 21 bp, Artificial Sequence
  source: /note="Description of Artificial Sequence: Synthetic oligonucleotide"
acgtcgatgagtcctaggcat

SEQ ID NO: 26576 - DNA, 21 bp, Artificial Sequence
  source: /note="Description of Artificial Sequence: Synthetic oligonucleotide"
acttcgatgtctcctactacg

SEQ ID NO: 26577 - DNA, 21 bp, Artificial Sequence
  source: /note="Description of Artificial Sequence: Synthetic oligonucleotide"
acgtcgaatgctgttgattat

SEQ ID NO: 26578 - DNA, 21 bp, Artificial Sequence
  source: /note="Description of Artificial Sequence: Synthetic oligonucleotide"
acgtctaatggtcttaagctg

SEQ ID NO: 26579 - DNA, 21 bp, Artificial Sequence
  source: /note="Description of Artificial Sequence: Synthetic oligonucleotide"
actagtaatccgttgccgcgg

SEQ ID NO: 26580 - DNA, 21 bp, Artificial Sequence
  source: /note="Description of Artificial Sequence: Synthetic oligonucleotide"
actagtaatcagagtgctatg

SEQ ID NO: 26581 - DNA, 21 bp, Artificial Sequence
  source: /note="Description of Artificial Sequence: Synthetic oligonucleotide"
acgagtaatactagtatgagt

SEQ ID NO: 26582 - DNA, 21 bp, Artificial Sequence
  source: /note="Description of Artificial Sequence: Synthetic oligonucleotide"
acgtctaatgtgcgtccgtat

SEQ ID NO: 26583 - DNA, 21 bp, Artificial Sequence
  source: /note="Description of Artificial Sequence: Synthetic oligonucleotide"
acgagtaattatcattcgctg

SEQ ID NO: 26584 - DNA, 21 bp, Artificial Sequence
  source: /note="Description of Artificial Sequence: Synthetic oligonucleotide"
acttcgaattatttgcagacg

SEQ ID NO: 26585 - DNA, 21 bp, Artificial Sequence
  source: /note="Description of Artificial Sequence: Synthetic oligonucleotide"
actagtccggctaggtattct

SEQ ID NO: 26586 - DNA, 21 bp, Artificial Sequence
  source: /note="Description of Artificial Sequence: Synthetic oligonucleotide"
acgtctccggatttttcgttg

SEQ ID NO: 26587 - DNA, 21 bp, Artificial Sequence
  source: /note="Description of Artificial Sequence: Synthetic oligonucleotide"
acttctcctgatcctaataag

SEQ ID NO: 26588 - DNA, 21 bp, Artificial Sequence
  source: /note="Description of Artificial Sequence: Synthetic oligonucleotide"
acttctcctatgcatactatt

SEQ ID NO: 26589 - DNA, 21 bp, Artificial Sequence
  source: /note="Description of Artificial Sequence: Synthetic oligonucleotide"
acttcgcctcctttgagtact

SEQ ID NO: 26590 - DNA, 21 bp, Artificial Sequence
  source: /note="Description of Artificial Sequence: Synthetic oligonucleotide"
acgtcgccgacgggtccgacg

SEQ ID NO: 26591 - DNA, 21 bp, Artificial Sequence
  source: /note="Description of Artificial Sequence: Synthetic oligonucleotide"
actagtcctgtttctcatgtg

SEQ ID NO: 26592 - DNA, 21 bp, Artificial Sequence
  source: /note="Description of Artificial Sequence: Synthetic oligonucleotide"
actagtcaggctgttcatctg

SEQ ID NO: 26593 - DNA, 21 bp, Artificial Sequence
  source: /note="Description of Artificial Sequence: Synthetic oligonucleotide"
acttcgcagcataggcaggct

SEQ ID NO: 26594 - DNA, 21 bp, Artificial Sequence
  source: /note="Description of Artificial Sequence: Synthetic oligonucleotide"
acttcgcagattaatcgtcag

SEQ ID NO: 26595 - DNA, 21 bp, Artificial Sequence
  source: /note="Description of Artificial Sequence: Synthetic oligonucleotide"
acgtctcagcagctgccgcag

SEQ ID NO: 26596 - DNA, 21 bp, Artificial Sequence
  source: /note="Description of Artificial Sequence: Synthetic oligonucleotide"
acttcgcagcgtcctatgctt

SEQ ID NO: 26597 - DNA, 21 bp, Artificial Sequence
  source: /note="Description of Artificial Sequence: Synthetic oligonucleotide"
acttcgcagcggtatcagccg

SEQ ID NO: 26598 - DNA, 21 bp, Artificial Sequence
  source: /note="Description of Artificial Sequence: Synthetic oligonucleotide"
acgtcgcaggtgcggacgact

SEQ ID NO: 26599 - DNA, 21 bp, Artificial Sequence
  source: /note="Description of Artificial Sequence: Synthetic oligonucleotide"
acgtctagggcgcctgtgttg

SEQ ID NO: 26600 - DNA, 21 bp, Artificial Sequence
  source: /note="Description of Artificial Sequence: Synthetic oligonucleotide"
acgtctagggatcatgttcgt

SEQ ID NO: 26601 - DNA, 21 bp, Artificial Sequence
  source: /note="Description of Artificial Sequence: Synthetic oligonucleotide"
acttctcgggagacttatact

SEQ ID NO: 26602 - DNA, 21 bp, Artificial Sequence
  source: /note="Description of Artificial Sequence: Synthetic oligonucleotide"
acgtcgcgtaatgaggttgcg

SEQ ID NO: 26603 - DNA, 21 bp, Artificial Sequence
  source: /note="Description of Artificial Sequence: Synthetic oligonucleotide"
actagtcgtacgattactacg

SEQ ID NO: 26604 - DNA, 21 bp, Artificial Sequence
  source: /note="Description of Artificial Sequence: Synthetic oligonucleotide"
acgagtcgtactaatgatcct

SEQ ID NO: 26605 - DNA, 21 bp, Artificial Sequence
  source: /note="Description of Artificial Sequence: Synthetic oligonucleotide"
acttctagggttgatactagt

SEQ ID NO: 26606 - DNA, 21 bp, Artificial Sequence
  source: /note="Description of Artificial Sequence: Synthetic oligonucleotide"
actagttcggcgtctgctgtt

SEQ ID NO: 26607 - DNA, 21 bp, Artificial Sequence
  source: /note="Description of Artificial Sequence: Synthetic oligonucleotide"
actagttcggatgggttgggt

SEQ ID NO: 26608 - DNA, 21 bp, Artificial Sequence
  source: /note="Description of Artificial Sequence: Synthetic oligonucleotide"
acttcttctgggtttaaggtt

SEQ ID NO: 26609 - DNA, 21 bp, Artificial Sequence
  source: /note="Description of Artificial Sequence: Synthetic oligonucleotide"
acttcgtcgggtctgacgggt

SEQ ID NO: 26610 - DNA, 21 bp, Artificial Sequence
  source: /note="Description of Artificial Sequence: Synthetic oligonucleotide"
acgtcttctgggactaatcag

SEQ ID NO: 26611 - DNA, 21 bp, Artificial Sequence
  source: /note="Description of Artificial Sequence: Synthetic oligonucleotide"
acgagtagtcattcggatgtt

SEQ ID NO: 26612 - DNA, 21 bp, Artificial Sequence
  source: /note="Description of Artificial Sequence: Synthetic oligonucleotide"
acgagttctcatactgagcat

SEQ ID NO: 26613 - DNA, 21 bp, Artificial Sequence
  source: /note="Description of Artificial Sequence: Synthetic oligonucleotide"
acgagttcgttggctcatatt

SEQ ID NO: 26614 - DNA, 21 bp, Artificial Sequence
  source: /note="Description of Artificial Sequence: Synthetic oligonucleotide"
actagtagtctggctactcat

SEQ ID NO: 26615 - DNA, 21 bp, Artificial Sequence
  source: /note="Description of Artificial Sequence: Synthetic oligonucleotide"
acgagtagtttgaggttggat

SEQ ID NO: 26616 - DNA, 21 bp, Artificial Sequence
  source: /note="Description of Artificial Sequence: Synthetic oligonucleotide"
actagttctcttaggcctcct

SEQ ID NO: 26617 - DNA, 21 bp, Artificial Sequence
  source: /note="Description of Artificial Sequence: Synthetic oligonucleotide"
acttcgtcgaattatccgtcg

SEQ ID NO: 26618 - DNA, 21 bp, Artificial Sequence
  source: /note="Description of Artificial Sequence: Synthetic oligonucleotide"
acgtcgtctccggcgctgact

SEQ ID NO: 26619 - DNA, 21 bp, Artificial Sequence
  source: /note="Description of Artificial Sequence: Synthetic oligonucleotide"
acttcttcgccgcttcagggt

SEQ ID NO: 26620 - DNA, 21 bp, Artificial Sequence
  source: /note="Description of Artificial Sequence: Synthetic oligonucleotide"
actagttcgcagcattcgact

SEQ ID NO: 26621 - DNA, 21 bp, Artificial Sequence
  source: /note="Description of Artificial Sequence: Synthetic oligonucleotide"
acgtctagtcgggcttattcg

SEQ ID NO: 26622 - DNA, 21 bp, Artificial Sequence
  source: /note="Description of Artificial Sequence: Synthetic oligonucleotide"
acgtcttcgcgtcttcctttt

SEQ ID NO: 26623 - DNA, 21 bp, Artificial Sequence
  source: /note="Description of Artificial Sequence: Synthetic oligonucleotide"
acgtcttcgtcggcgcgtgat

SEQ ID NO: 26624 - DNA, 21 bp, Artificial Sequence
  source: /note="Description of Artificial Sequence: Synthetic oligonucleotide"
acttcgagttcggggcttact

SEQ ID NO: 26625 - DNA, 21 bp, Artificial Sequence
  source: /note="Description of Artificial Sequence: Synthetic oligonucleotide"
acgtcgagtagtaatagtcct

SEQ ID NO: 26626 - DNA, 21 bp, Artificial Sequence
  source: /note="Description of Artificial Sequence: Synthetic oligonucleotide"
acttcttcgacgatgtcgcct

SEQ ID NO: 26627 - DNA, 21 bp, Artificial Sequence
  source: /note="Description of Artificial Sequence: Synthetic oligonucleotide"
acgtcgtcgacttatgaggag

SEQ ID NO: 26628 - DNA, 21 bp, Artificial Sequence
  source: /note="Description of Artificial Sequence: Synthetic oligonucleotide"
actagtagtgttagttcgatt

SEQ ID NO: 26629 - DNA, 21 bp, Artificial Sequence
  source: /note="Description of Artificial Sequence: Synthetic oligonucleotide"
acgagtacggctgctcttcct

SEQ ID NO: 26630 - DNA, 21 bp, Artificial Sequence
  source: /note="Description of Artificial Sequence: Synthetic oligonucleotide"
acttcgacttttgaggggatg

SEQ ID NO: 26631 - DNA, 21 bp, Artificial Sequence
  source: /note="Description of Artificial Sequence: Synthetic oligonucleotide"
acgagtactggtcatacggtt

SEQ ID NO: 26632 - DNA, 21 bp, Artificial Sequence
  source: /note="Description of Artificial Sequence: Synthetic oligonucleotide"
acgtcgacgggtgtgcgtatg

SEQ ID NO: 26633 - DNA, 21 bp, Artificial Sequence
  source: /note="Description of Artificial Sequence: Synthetic oligonucleotide"
acgtcgactttgctgtctctt

SEQ ID NO: 26634 - DNA, 21 bp, Artificial Sequence
  source: /note="Description of Artificial Sequence: Synthetic oligonucleotide"
actagtacgaatagtcttgct

SEQ ID NO: 26635 - DNA, 21 bp, Artificial Sequence
  source: /note="Description of Artificial Sequence: Synthetic oligonucleotide"
acgtctacgtctatggctatt

SEQ ID NO: 26636 - DNA, 21 bp, Artificial Sequence
  source: /note="Description of Artificial Sequence: Synthetic oligonucleotide"
acgtctacttcgaatcggaat

SEQ ID NO: 26637 - DNA, 21 bp, Artificial Sequence
  source: /note="Description of Artificial Sequence: Synthetic oligonucleotide"
acttctactacgatgccgctt

SEQ ID NO: 26638 - DNA, 21 bp, Artificial Sequence
  source: /note="Description of Artificial Sequence: Synthetic oligonucleotide"
acttcgactacggttgggaat

SEQ ID NO: 26639 - DNA, 21 bp, Artificial Sequence
  source: /note="Description of Artificial Sequence: Synthetic oligonucleotide"
acttcgactgtgagtcctaag

SEQ ID NO: 26640 - DNA, 21 bp, Artificial Sequence
  source: /note="Description of Artificial Sequence: Synthetic oligonucleotide"
acttcggttgagcgttcttgg

SEQ ID NO: 26641 - DNA, 21 bp, Artificial Sequence
  source: /note="Description of Artificial Sequence: Synthetic oligonucleotide"
acgtctgtgggtgatcatttt

SEQ ID NO: 26642 - DNA, 21 bp, Artificial Sequence
  source: /note="Description of Artificial Sequence: Synthetic oligonucleotide"
acgtctgttggttggcagccg

SEQ ID NO: 26643 - DNA, 21 bp, Artificial Sequence
  source: /note="Description of Artificial Sequence: Synthetic oligonucleotide"
acgtcggtgaagtcggcgtcg

SEQ ID NO: 26644 - DNA, 21 bp, Artificial Sequence
  source: /note="Description of Artificial Sequence: Synthetic oligonucleotide"
actagtgtgcagccgccgcct

SEQ ID NO: 26645 - DNA, 21 bp, Artificial Sequence
  source: /note="Description of Artificial Sequence: Synthetic oligonucleotide"
acttcggtttcgcatgctggt

SEQ ID NO: 26646 - DNA, 21 bp, Artificial Sequence
  source: /note="Description of Artificial Sequence: Synthetic oligonucleotide"
actagtgttacgatgaaggtg

SEQ ID NO: 26647 - DNA, 21 bp, Artificial Sequence
  source: /note="Description of Artificial Sequence: Synthetic oligonucleotide"
acgtcggtgactactcattat

SEQ ID NO: 26648 - DNA, 21 bp, Artificial Sequence
  source: /note="Description of Artificial Sequence: Synthetic oligonucleotide"
acgtcgtggcagggtgctgtt

SEQ ID NO: 26649 - DNA, 21 bp, Artificial Sequence
  source: /note="Description of Artificial Sequence: Synthetic oligonucleotide"
acgagttatggtccgaaggtt

SEQ ID NO: 26650 - DNA, 21 bp, Artificial Sequence
  source: /note="Description of Artificial Sequence: Synthetic oligonucleotide"
actagttatcagcgtattgag

SEQ ID NO: 26651 - DNA, 21 bp, Artificial Sequence
  source: /note="Description of Artificial Sequence: Synthetic oligonucleotide"
actacggcggcgaaggtgggt

SEQ ID NO: 26652 - DNA, 21 bp, Artificial Sequence
  source: /note="Description of Artificial Sequence: Synthetic oligonucleotide"
actacggctgagtatactagg

SEQ ID NO: 26653 - DNA, 21 bp, Artificial Sequence
  source: /note="Description of Artificial Sequence: Synthetic oligonucleotide"
acgacggctttgcctcagttt

SEQ ID NO: 26654 - DNA, 21 bp, Artificial Sequence
  source: /note="Description of Artificial Sequence: Synthetic oligonucleotide"
acgactgctatgaggggtcct

SEQ ID NO: 26655 - DNA, 21 bp, Artificial Sequence
  source: /note="Description of Artificial Sequence: Synthetic oligonucleotide"
actacggctcgtcagtttcag

SEQ ID NO: 26656 - DNA, 21 bp, Artificial Sequence
  source: /note="Description of Artificial Sequence: Synthetic oligonucleotide"
actacggcggtttcgtctaag

SEQ ID NO: 26657 - DNA, 21 bp, Artificial Sequence
  source: /note="Description of Artificial Sequence: Synthetic oligonucleotide"
actactgatgctgcgaggcct

SEQ ID NO: 26658 - DNA, 21 bp, Artificial Sequence
  source: /note="Description of Artificial Sequence: Synthetic oligonucleotide"
acgacggattgttgtgctgct

SEQ ID NO: 26659 - DNA, 21 bp, Artificial Sequence
  source: /note="Description of Artificial Sequence: Synthetic oligonucleotide"
acgactgatgtttatgtgcgt

SEQ ID NO: 26660 - DNA, 21 bp, Artificial Sequence
  source: /note="Description of Artificial Sequence: Synthetic oligonucleotide"
actactgattatcctctgagt

SEQ ID NO: 26661 - DNA, 21 bp, Artificial Sequence
  source: /note="Description of Artificial Sequence: Synthetic oligonucleotide"
actacggagcatggttatgtt

SEQ ID NO: 26662 - DNA, 21 bp, Artificial Sequence
  source: /note="Description of Artificial Sequence: Synthetic oligonucleotide"
acgacttttcttcagaatggt

SEQ ID NO: 26663 - DNA, 21 bp, Artificial Sequence
  source: /note="Description of Artificial Sequence: Synthetic oligonucleotide"
actactggtgctattgatatt

SEQ ID NO: 26664 - DNA, 21 bp, Artificial Sequence
  source: /note="Description of Artificial Sequence: Synthetic oligonucleotide"
actacgggtcatctttctgtt

SEQ ID NO: 26665 - DNA, 21 bp, Artificial Sequence
  source: /note="Description of Artificial Sequence: Synthetic oligonucleotide"
actacgggtcatacgcttatt

SEQ ID NO: 26666 - DNA, 21 bp, Artificial Sequence
  source: /note="Description of Artificial Sequence: Synthetic oligonucleotide"
actactgggcttagtctgggt

SEQ ID NO: 26667 - DNA, 21 bp, Artificial Sequence
  source: /note="Description of Artificial Sequence: Synthetic oligonucleotide"
acgactgggaattctcttcct

SEQ ID NO: 26668 - DNA, 21 bp, Artificial Sequence
  source: /note="Description of Artificial Sequence: Synthetic oligonucleotide"
actactggtaatacgttgtct

SEQ ID NO: 26669 - DNA, 21 bp, Artificial Sequence
  source: /note="Description of Artificial Sequence: Synthetic oligonucleotide"
actactggttcgattcctcat

SEQ ID NO: 26670 - DNA, 21 bp, Artificial Sequence
  source: /note="Description of Artificial Sequence: Synthetic oligonucleotide"
actactcatgctcctctttcg

SEQ ID NO: 26671 - DNA, 21 bp, Artificial Sequence
  source: /note="Description of Artificial Sequence: Synthetic oligonucleotide"
actacgcatgcttcgtgtacg

SEQ ID NO: 26672 - DNA, 21 bp, Artificial Sequence
  source: /note="Description of Artificial Sequence: Synthetic oligonucleotide"
actactcatgatgtttatcgg

SEQ ID NO: 26673 - DNA, 21 bp, Artificial Sequence
  source: /note="Description of Artificial Sequence: Synthetic oligonucleotide"
actactcattcgacggcggcg

SEQ ID NO: 26674 - DNA, 21 bp, Artificial Sequence
  source: /note="Description of Artificial Sequence: Synthetic oligonucleotide"
actacgcatacgcagtatcgt

SEQ ID NO: 26675 - DNA, 21 bp, Artificial Sequence
  source: /note="Description of Artificial Sequence: Synthetic oligonucleotide"
actacgattcttggtcctatg

SEQ ID NO: 26676 - DNA, 21 bp, Artificial Sequence
  source: /note="Description of Artificial Sequence: Synthetic oligonucleotide"
acgacgaagattggtgatgat

SEQ ID NO: 26677 - DNA, 21 bp, Artificial Sequence
  source: /note="Description of Artificial Sequence: Synthetic oligonucleotide"
actactaagagtgctgatact

SEQ ID NO: 26678 - DNA, 21 bp, Artificial Sequence
  source: /note="Description of Artificial Sequence: Synthetic oligonucleotide"
acgacgaaggttggttctccg

SEQ ID NO: 26679 - DNA, 21 bp, Artificial Sequence
  source: /note="Description of Artificial Sequence: Synthetic oligonucleotide"
actacgttggatccttctttg

SEQ ID NO: 26680 - DNA, 21 bp, Artificial Sequence
  source: /note="Description of Artificial Sequence: Synthetic oligonucleotide"
actacgcttggtccgtcgcgt

SEQ ID NO: 26681 - DNA, 21 bp, Artificial Sequence
  source: /note="Description of Artificial Sequence: Synthetic oligonucleotide"
acgacgcttgggtctgctgtg

SEQ ID NO: 26682 - DNA, 21 bp, Artificial Sequence
  source: /note="Description of Artificial Sequence: Synthetic oligonucleotide"
acgacgttgagtgggggtact

SEQ ID NO: 26683 - DNA, 21 bp, Artificial Sequence
  source: /note="Description of Artificial Sequence: Synthetic oligonucleotide"
actactctgtcgccgaataag

SEQ ID NO: 26684 - DNA, 21 bp, Artificial Sequence
  source: /note="Description of Artificial Sequence: Synthetic oligonucleotide"
acgacgctgtctccgaggggt

SEQ ID NO: 26685 - DNA, 21 bp, Artificial Sequence
  source: /note="Description of Artificial Sequence: Synthetic oligonucleotide"
actacgttgtctagtctggct

SEQ ID NO: 26686 - DNA, 21 bp, Artificial Sequence
  source: /note="Description of Artificial Sequence: Synthetic oligonucleotide"
actactatggctcttggggcg

SEQ ID NO: 26687 - DNA, 21 bp, Artificial Sequence
  source: /note="Description of Artificial Sequence: Synthetic oligonucleotide"
acgactatgaagccggaggct

SEQ ID NO: 26688 - DNA, 21 bp, Artificial Sequence
  source: /note="Description of Artificial Sequence: Synthetic oligonucleotide"
actactatgactttggtttcg

SEQ ID NO: 26689 - DNA, 21 bp, Artificial Sequence
  source: /note="Description of Artificial Sequence: Synthetic oligonucleotide"
actacgatgtatacgactact

SEQ ID NO: 26690 - DNA, 21 bp, Artificial Sequence
  source: /note="Description of Artificial Sequence: Synthetic oligonucleotide"
acgactaatgctcagggtggt

SEQ ID NO: 26691 - DNA, 21 bp, Artificial Sequence
  source: /note="Description of Artificial Sequence: Synthetic oligonucleotide"
actacgaatattgtgcggcag

SEQ ID NO: 26692 - DNA, 21 bp, Artificial Sequence
  source: /note="Description of Artificial Sequence: Synthetic oligonucleotide"
actactaatttggctatgatg

SEQ ID NO: 26693 - DNA, 21 bp, Artificial Sequence
  source: /note="Description of Artificial Sequence: Synthetic oligonucleotide"
acgacgccgggttatgctccg

SEQ ID NO: 26694 - DNA, 21 bp, Artificial Sequence
  source: /note="Description of Artificial Sequence: Synthetic oligonucleotide"
acgacgcctattagggatggt

SEQ ID NO: 26695 - DNA, 21 bp, Artificial Sequence
  source: /note="Description of Artificial Sequence: Synthetic oligonucleotide"
actactcctttgacgaagggg

SEQ ID NO: 26696 - DNA, 21 bp, Artificial Sequence
  source: /note="Description of Artificial Sequence: Synthetic oligonucleotide"
actactcctccgatgcatctt

SEQ ID NO: 26697 - DNA, 21 bp, Artificial Sequence
  source: /note="Description of Artificial Sequence: Synthetic oligonucleotide"
actactcctcagctgaatttg

SEQ ID NO: 26698 - DNA, 21 bp, Artificial Sequence
  source: /note="Description of Artificial Sequence: Synthetic oligonucleotide"
acgacgcctaggttgttgtct

SEQ ID NO: 26699 - DNA, 21 bp, Artificial Sequence
  source: /note="Description of Artificial Sequence: Synthetic oligonucleotide"
acgactcctactgatggggcg

SEQ ID NO: 26700 - DNA, 21 bp, Artificial Sequence
  source: /note="Description of Artificial Sequence: Synthetic oligonucleotide"
acgacgccgacgaatcgtcct

SEQ ID NO: 26701 - DNA, 21 bp, Artificial Sequence
  source: /note="Description of Artificial Sequence: Synthetic oligonucleotide"
actacgcaggagcatctgccg

SEQ ID NO: 26702 - DNA, 21 bp, Artificial Sequence
  source: /note="Description of Artificial Sequence: Synthetic oligonucleotide"
acgacgcagaatgtgaatcag

SEQ ID NO: 26703 - DNA, 21 bp, Artificial Sequence
  source: /note="Description of Artificial Sequence: Synthetic oligonucleotide"
acgacgcagtctacttatgag

SEQ ID NO: 26704 - DNA, 21 bp, Artificial Sequence
  source: /note="Description of Artificial Sequence: Synthetic oligonucleotide"
acgacgcagacggctgagacg

SEQ ID NO: 26705 - DNA, 21 bp, Artificial Sequence
  source: /note="Description of Artificial Sequence: Synthetic oligonucleotide"
acgacgagggatcctccggct

SEQ ID NO: 26706 - DNA, 21 bp, Artificial Sequence
  source: /note="Description of Artificial Sequence: Synthetic oligonucleotide"
actacgaggggtgatgagcct

SEQ ID NO: 26707 - DNA, 21 bp, Artificial Sequence
  source: /note="Description of Artificial Sequence: Synthetic oligonucleotide"
acgactaggattgcggctgag

SEQ ID NO: 26708 - DNA, 21 bp, Artificial Sequence
  source: /note="Description of Artificial Sequence: Synthetic oligonucleotide"
acgactcggctggctcttgct

SEQ ID NO: 26709 - DNA, 21 bp, Artificial Sequence
  source: /note="Description of Artificial Sequence: Synthetic oligonucleotide"
actacgcggctggtgagtccg

SEQ ID NO: 26710 - DNA, 21 bp, Artificial Sequence
  source: /note="Description of Artificial Sequence: Synthetic oligonucleotide"
acgacgcgtcctccgcattat

SEQ ID NO: 26711 - DNA, 21 bp, Artificial Sequence
  source: /note="Description of Artificial Sequence: Synthetic oligonucleotide"
actacgcgtccgtctgagccg

SEQ ID NO: 26712 - DNA, 21 bp, Artificial Sequence
  source: /note="Description of Artificial Sequence: Synthetic oligonucleotide"
actacgaggcagtctgataat

SEQ ID NO: 26713 - DNA, 21 bp, Artificial Sequence
  source: /note="Description of Artificial Sequence: Synthetic oligonucleotide"
actactcgttcggctgcgtct

SEQ ID NO: 26714 - DNA, 21 bp, Artificial Sequence
  source: /note="Description of Artificial Sequence: Synthetic oligonucleotide"
actacgaggagtgagtctggt

SEQ ID NO: 26715 - DNA, 21 bp, Artificial Sequence
  source: /note="Description of Artificial Sequence: Synthetic oligonucleotide"
acgactcggtctgtgctgcag

SEQ ID NO: 26716 - DNA, 21 bp, Artificial Sequence
  source: /note="Description of Artificial Sequence: Synthetic oligonucleotide"
actactagggttgagatggct

SEQ ID NO: 26717 - DNA, 21 bp, Artificial Sequence
  source: /note="Description of Artificial Sequence: Synthetic oligonucleotide"
acgactcgggttgggttggtg

SEQ ID NO: 26718 - DNA, 21 bp, Artificial Sequence
  source: /note="Description of Artificial Sequence: Synthetic oligonucleotide"
actactagtgcggatcattct

SEQ ID NO: 26719 - DNA, 21 bp, Artificial Sequence
  source: /note="Description of Artificial Sequence: Synthetic oligonucleotide"
acgactagtgcgcgtgagctt

SEQ ID NO: 26720 - DNA, 21 bp, Artificial Sequence
  source: /note="Description of Artificial Sequence: Synthetic oligonucleotide"
acgacgtcgggtgatcgtctg

SEQ ID NO: 26721 - DNA, 21 bp, Artificial Sequence
  source: /note="Description of Artificial Sequence: Synthetic oligonucleotide"
acgacttctgggtttagtcct

SEQ ID NO: 26722 - DNA, 21 bp, Artificial Sequence
  source: /note="Description of Artificial Sequence: Synthetic oligonucleotide"
actacgtcgcatgctccgtct

SEQ ID NO: 26723 - DNA, 21 bp, Artificial Sequence
  source: /note="Description of Artificial Sequence: Synthetic oligonucleotide"
actactagtcatcctcttatg

SEQ ID NO: 26724 - DNA, 21 bp, Artificial Sequence
  source: /note="Description of Artificial Sequence: Synthetic oligonucleotide"
acgacgagtattgggtcggcg

SEQ ID NO: 26725 - DNA, 21 bp, Artificial Sequence
  source: /note="Description of Artificial Sequence: Synthetic oligonucleotide"
actacgtctctgggtcgtgtt

SEQ ID NO: 26726 - DNA, 21 bp, Artificial Sequence
  source: /note="Description of Artificial Sequence: Synthetic oligonucleotide"
actacgtctttgatggaggct

SEQ ID NO: 26727 - DNA, 21 bp, Artificial Sequence
  source: /note="Description of Artificial Sequence: Synthetic oligonucleotide"
acgacgagtaatgttcatact

SEQ ID NO: 26728 - DNA, 21 bp, Artificial Sequence
  source: /note="Description of Artificial Sequence: Synthetic oligonucleotide"
actacttctccgttgcgtact

SEQ ID NO: 26729 - DNA, 21 bp, Artificial Sequence
  source: /note="Description of Artificial Sequence: Synthetic oligonucleotide"
acgactagtccgcagaggtct

SEQ ID NO: 26730 - DNA, 21 bp, Artificial Sequence
  source: /note="Description of Artificial Sequence: Synthetic oligonucleotide"
acgacttcgcgtctgtctgct

SEQ ID NO: 26731 - DNA, 21 bp, Artificial Sequence
  source: /note="Description of Artificial Sequence: Synthetic oligonucleotide"
acgacttcgagtagtccgtct

SEQ ID NO: 26732 - DNA, 21 bp, Artificial Sequence
  source: /note="Description of Artificial Sequence: Synthetic oligonucleotide"
acgactactgctatgattgtg

SEQ ID NO: 26733 - DNA, 21 bp, Artificial Sequence
  source: /note="Description of Artificial Sequence: Synthetic oligonucleotide"
actactacggcgagttttgag

SEQ ID NO: 26734 - DNA, 21 bp, Artificial Sequence
  source: /note="Description of Artificial Sequence: Synthetic oligonucleotide"
acgactactgataagccgctt

SEQ ID NO: 26735 - DNA, 21 bp, Artificial Sequence
  source: /note="Description of Artificial Sequence: Synthetic oligonucleotide"
acgacgacggatgtggcgcgt

SEQ ID NO: 26736 - DNA, 21 bp, Artificial Sequence
  source: /note="Description of Artificial Sequence: Synthetic oligonucleotide"
acgactacggagaggactagg

SEQ ID NO: 26737 - DNA, 21 bp, Artificial Sequence
  source: /note="Description of Artificial Sequence: Synthetic oligonucleotide"
actacgacgaagcatgtgtat

SEQ ID NO: 26738 - DNA, 21 bp, Artificial Sequence
  source: /note="Description of Artificial Sequence: Synthetic oligonucleotide"
acgacgacgcctattactaat

SEQ ID NO: 26739 - DNA, 21 bp, Artificial Sequence
  source: /note="Description of Artificial Sequence: Synthetic oligonucleotide"
actacgactcgtgtgaatgcg

SEQ ID NO: 26740 - DNA, 21 bp, Artificial Sequence
  source: /note="Description of Artificial Sequence: Synthetic oligonucleotide"
acgactacggttccgattttt

SEQ ID NO: 26741 - DNA, 21 bp, Artificial Sequence
  source: /note="Description of Artificial Sequence: Synthetic oligonucleotide"
actactactgtgacttatctt

SEQ ID NO: 26742 - DNA, 21 bp, Artificial Sequence
  source: /note="Description of Artificial Sequence: Synthetic oligonucleotide"
actactgtggatgtggtgcat

SEQ ID NO: 26743 - DNA, 21 bp, Artificial Sequence
  source: /note="Description of Artificial Sequence: Synthetic oligonucleotide"
acgactgttcctgatagtgtt

SEQ ID NO: 26744 - DNA, 21 bp, Artificial Sequence
  source: /note="Description of Artificial Sequence: Synthetic oligonucleotide"
actactgttccgaatacgtcg

SEQ ID NO: 26745 - DNA, 21 bp, Artificial Sequence
  source: /note="Description of Artificial Sequence: Synthetic oligonucleotide"
acgactgtgagggttcatccg

SEQ ID NO: 26746 - DNA, 21 bp, Artificial Sequence
  source: /note="Description of Artificial Sequence: Synthetic oligonucleotide"
acgacggtggtgtcggatttg

SEQ ID NO: 26747 - DNA, 21 bp, Artificial Sequence
  source: /note="Description of Artificial Sequence: Synthetic oligonucleotide"
acgactgtggtttatactgcg

SEQ ID NO: 26748 - DNA, 21 bp, Artificial Sequence
  source: /note="Description of Artificial Sequence: Synthetic oligonucleotide"
acgacgtatcctattcatgct

SEQ ID NO: 26749 - DNA, 21 bp, Artificial Sequence
  source: /note="Description of Artificial Sequence: Synthetic oligonucleotide"
actacttattctaattcggct

SEQ ID NO: 26750 - DNA, 21 bp, Artificial Sequence
  source: /note="Description of Artificial Sequence: Synthetic oligonucleotide"
acggtggctgggaatattgcg

SEQ ID NO: 26751 - DNA, 21 bp, Artificial Sequence
  source: /note="Description of Artificial Sequence: Synthetic oligonucleotide"
actgttgctcataggattcct

SEQ ID NO: 26752 - DNA, 21 bp, Artificial Sequence
  source: /note="Description of Artificial Sequence: Synthetic oligonucleotide"
actgtggctattcatgagcct

SEQ ID NO: 26753 - DNA, 21 bp, Artificial Sequence
  source: /note="Description of Artificial Sequence: Synthetic oligonucleotide"
actgttgctccggatctgaat

SEQ ID NO: 26754 - DNA, 21 bp, Artificial Sequence
  source: /note="Description of Artificial Sequence: Synthetic oligonucleotide"
actgtttgtgtgtcgaggact

SEQ ID NO: 26755 - DNA, 21 bp, Artificial Sequence
  source: /note="Description of Artificial Sequence: Synthetic oligonucleotide"
acggtggatgagtgggctggg

SEQ ID NO: 26756 - DNA, 21 bp, Artificial Sequence
  source: /note="Description of Artificial Sequence: Synthetic oligonucleotide"
acggttgatggttcgcatcag

SEQ ID NO: 26757 - DNA, 21 bp, Artificial Sequence
  source: /note="Description of Artificial Sequence: Synthetic oligonucleotide"
acggttgattctagtggggtt

SEQ ID NO: 26758 - DNA, 21 bp, Artificial Sequence
  source: /note="Description of Artificial Sequence: Synthetic oligonucleotide"
acggttgatactaagcattct

SEQ ID NO: 26759 - DNA, 21 bp, Artificial Sequence
  source: /note="Description of Artificial Sequence: Synthetic oligonucleotide"
actgtggagggtgatcgtctt

SEQ ID NO: 26760 - DNA, 21 bp, Artificial Sequence
  source: /note="Description of Artificial Sequence: Synthetic oligonucleotide"
acggttttttcggagtctgag

SEQ ID NO: 26761 - DNA, 21 bp, Artificial Sequence
  source: /note="Description of Artificial Sequence: Synthetic oligonucleotide"
acggtgggtcatcttaatgtt

SEQ ID NO: 26762 - DNA, 21 bp, Artificial Sequence
  source: /note="Description of Artificial Sequence: Synthetic oligonucleotide"
actgttggtaattatcgtgat

SEQ ID NO: 26763 - DNA, 21 bp, Artificial Sequence
  source: /note="Description of Artificial Sequence: Synthetic oligonucleotide"
acggttggttctctttctgat

SEQ ID NO: 26764 - DNA, 21 bp, Artificial Sequence
  source: /note="Description of Artificial Sequence: Synthetic oligonucleotide"
acggtgggtacgctgatgttg

SEQ ID NO: 26765 - DNA, 21 bp, Artificial Sequence
  source: /note="Description of Artificial Sequence: Synthetic oligonucleotide"
acggttggtactccgccgact

SEQ ID NO: 26766 - DNA, 21 bp, Artificial Sequence
  source: /note="Description of Artificial Sequence: Synthetic oligonucleotide"
acggtgggtacgcgggctatg

SEQ ID NO: 26767 - DNA, 21 bp, Artificial Sequence
  source: /note="Description of Artificial Sequence: Synthetic oligonucleotide"
actgtgggggtggaggggtcg

SEQ ID NO: 26768 - DNA, 21 bp, Artificial Sequence
  source: /note="Description of Artificial Sequence: Synthetic oligonucleotide"
acggttggtgttaatgcttct

SEQ ID NO: 26769 - DNA, 21 bp, Artificial Sequence
  source: /note="Description of Artificial Sequence: Synthetic oligonucleotide"
acggttcattttagtcaggcg

SEQ ID NO: 26770 - DNA, 21 bp, Artificial Sequence
  source: /note="Description of Artificial Sequence: Synthetic oligonucleotide"
actgttcatattttgacgcct

SEQ ID NO: 26771 - DNA, 21 bp, Artificial Sequence
  source: /note="Description of Artificial Sequence: Synthetic oligonucleotide"
acggttcataatgttcagttt

SEQ ID NO: 26772 - DNA, 21 bp, Artificial Sequence
  source: /note="Description of Artificial Sequence: Synthetic oligonucleotide"
acggttcatcggcaggttgat

SEQ ID NO: 26773 - DNA, 21 bp, Artificial Sequence
  source: /note="Description of Artificial Sequence: Synthetic oligonucleotide"
actgtgcatacgtttagggag

SEQ ID NO: 26774 - DNA, 21 bp, Artificial Sequence
  source: /note="Description of Artificial Sequence: Synthetic oligonucleotide"
actgttaagatttctgagggg

SEQ ID NO: 26775 - DNA, 21 bp, Artificial Sequence
  source: /note="Description of Artificial Sequence: Synthetic oligonucleotide"
actgtgaagcagtctcaggtt

SEQ ID NO: 26776 - DNA, 21 bp, Artificial Sequence
  source: /note="Description of Artificial Sequence: Synthetic oligonucleotide"
actgttaaggtgagtaagccg

SEQ ID NO: 26777 - DNA, 21 bp, Artificial Sequence
  source: /note="Description of Artificial Sequence: Synthetic oligonucleotide"
acggtgcttgcggctaggggg

SEQ ID NO: 26778 - DNA, 21 bp, Artificial Sequence
  source: /note="Description of Artificial Sequence: Synthetic oligonucleotide"
acggtgctggcttcgcctgtg

SEQ ID NO: 26779 - DNA, 21 bp, Artificial Sequence
  source: /note="Description of Artificial Sequence: Synthetic oligonucleotide"
acggttcttgagtcgcagtcg

SEQ ID NO: 26780 - DNA, 21 bp, Artificial Sequence
  source: /note="Description of Artificial Sequence: Synthetic oligonucleotide"
actgttttgaagacttcgatt

SEQ ID NO: 26781 - DNA, 21 bp, Artificial Sequence
  source: /note="Description of Artificial Sequence: Synthetic oligonucleotide"
actgttatgcggactttggct

SEQ ID NO: 26782 - DNA, 21 bp, Artificial Sequence
  source: /note="Description of Artificial Sequence: Synthetic oligonucleotide"
actgtgatgcgtgttactggt

SEQ ID NO: 26783 - DNA, 21 bp, Artificial Sequence
  source: /note="Description of Artificial Sequence: Synthetic oligonucleotide"
acggttaatggtcttcgggct

SEQ ID NO: 26784 - DNA, 21 bp, Artificial Sequence
  source: /note="Description of Artificial Sequence: Synthetic oligonucleotide"
actgtgaatcatcagtcgttg

SEQ ID NO: 26785 - DNA, 21 bp, Artificial Sequence
  source: /note="Description of Artificial Sequence: Synthetic oligonucleotide"
actgttaatattgagactaat

SEQ ID NO: 26786 - DNA, 21 bp, Artificial Sequence
  source: /note="Description of Artificial Sequence: Synthetic oligonucleotide"
actgttaataaggtgtgtctg

SEQ ID NO: 26787 - DNA, 21 bp, Artificial Sequence
  source: /note="Description of Artificial Sequence: Synthetic oligonucleotide"
actgttaattataatgatatt

SEQ ID NO: 26788 - DNA, 21 bp, Artificial Sequence
  source: /note="Description of Artificial Sequence: Synthetic oligonucleotide"
actgtgcctgctgggcatgag

SEQ ID NO: 26789 - DNA, 21 bp, Artificial Sequence
  source: /note="Description of Artificial Sequence: Synthetic oligonucleotide"
actgttcctgcgcggacgatg

SEQ ID NO: 26790 - DNA, 21 bp, Artificial Sequence
  source: /note="Description of Artificial Sequence: Synthetic oligonucleotide"
actgtgcctcagagtgtgctt

SEQ ID NO: 26791 - DNA, 21 bp, Artificial Sequence
  source: /note="Description of Artificial Sequence: Synthetic oligonucleotide"
actgttccgactgcggttgct

SEQ ID NO: 26792 - DNA, 21 bp, Artificial Sequence
  source: /note="Description of Artificial Sequence: Synthetic oligonucleotide"
actgttccggttgcgattgtt

SEQ ID NO: 26793 - DNA, 21 bp, Artificial Sequence
  source: /note="Description of Artificial Sequence: Synthetic oligonucleotide"
acggtgcaggatacttttcgt

SEQ ID NO: 26794 - DNA, 21 bp, Artificial Sequence
  source: /note="Description of Artificial Sequence: Synthetic oligonucleotide"
acggtgcaggggattgatcgt

SEQ ID NO: 26795 - DNA, 21 bp, Artificial Sequence
  source: /note="Description of Artificial Sequence: Synthetic oligonucleotide"
actgttcagcagcaggcgaat

SEQ ID NO: 26796 - DNA, 21 bp, Artificial Sequence
  source: /note="Description of Artificial Sequence: Synthetic oligonucleotide"
actgttcagagtcctcttttg

SEQ ID NO: 26797 - DNA, 21 bp, Artificial Sequence
  source: /note="Description of Artificial Sequence: Synthetic oligonucleotide"
actgttcagtcgagtgcgact

SEQ ID NO: 26798 - DNA, 21 bp, Artificial Sequence
  source: /note="Description of Artificial Sequence: Synthetic oligonucleotide"
acggttcagactacgtctacg

SEQ ID NO: 26799 - DNA, 21 bp, Artificial Sequence
  source: /note="Description of Artificial Sequence: Synthetic oligonucleotide"
acggtgcaggtgcggctgcct

SEQ ID NO: 26800 - DNA, 21 bp, Artificial Sequence
  source: /note="Description of Artificial Sequence: Synthetic oligonucleotide"
acggttagggggatttcgttg

SEQ ID NO: 26801 - DNA, 21 bp, Artificial Sequence
  source: /note="Description of Artificial Sequence: Synthetic oligonucleotide"
actgttcgtgggttggatacg

SEQ ID NO: 26802 - DNA, 21 bp, Artificial Sequence
  source: /note="Description of Artificial Sequence: Synthetic oligonucleotide"
actgttcgtggtagtcctttg

SEQ ID NO: 26803 - DNA, 21 bp, Artificial Sequence
  source: /note="Description of Artificial Sequence: Synthetic oligonucleotide"
acggttcggctggatggggtt

SEQ ID NO: 26804 - DNA, 21 bp, Artificial Sequence
  source: /note="Description of Artificial Sequence: Synthetic oligonucleotide"
actgttcgtccggtttcttct

SEQ ID NO: 26805 - DNA, 21 bp, Artificial Sequence
  source: /note="Description of Artificial Sequence: Synthetic oligonucleotide"
actgtgcgttctccttcgatt

SEQ ID NO: 26806 - DNA, 21 bp, Artificial Sequence
  source: /note="Description of Artificial Sequence: Synthetic oligonucleotide"
actgtttctgctcagccgcgg

SEQ ID NO: 26807 - DNA, 21 bp, Artificial Sequence
  source: /note="Description of Artificial Sequence: Synthetic oligonucleotide"
actgtttctgatacttcgttt

SEQ ID NO: 26808 - DNA, 21 bp, Artificial Sequence
  source: /note="Description of Artificial Sequence: Synthetic oligonucleotide"
actgtgtctgggaagcatacg

SEQ ID NO: 26809 - DNA, 21 bp, Artificial Sequence
  source: /note="Description of Artificial Sequence: Synthetic oligonucleotide"
actgtgagtcatggtcagcgt

SEQ ID NO: 26810 - DNA, 21 bp, Artificial Sequence
  source: /note="Description of Artificial Sequence: Synthetic oligonucleotide"
acggtgtctaagatgggtggg

SEQ ID NO: 26811 - DNA, 21 bp, Artificial Sequence
  source: /note="Description of Artificial Sequence: Synthetic oligonucleotide"
acggtgtctcggaatgatgct

SEQ ID NO: 26812 - DNA, 21 bp, Artificial Sequence
  source: /note="Description of Artificial Sequence: Synthetic oligonucleotide"
actgttagtcggcaggtgtgt

SEQ ID NO: 26813 - DNA, 21 bp, Artificial Sequence
  source: /note="Description of Artificial Sequence: Synthetic oligonucleotide"
acggtgagtacgacttgtgct

SEQ ID NO: 26814 - DNA, 21 bp, Artificial Sequence
  source: /note="Description of Artificial Sequence: Synthetic oligonucleotide"
acggtgtcggtgactaagccg

SEQ ID NO: 26815 - DNA, 21 bp, Artificial Sequence
  source: /note="Description of Artificial Sequence: Synthetic oligonucleotide"
actgttagtgtggtggataag

SEQ ID NO: 26816 - DNA, 21 bp, Artificial Sequence
  source: /note="Description of Artificial Sequence: Synthetic oligonucleotide"
acggtgacggaggcgaggaat

SEQ ID NO: 26817 - DNA, 21 bp, Artificial Sequence
  source: /note="Description of Artificial Sequence: Synthetic oligonucleotide"
acggttacgggtaatggtttt

SEQ ID NO: 26818 - DNA, 21 bp, Artificial Sequence
  source: /note="Description of Artificial Sequence: Synthetic oligonucleotide"
acggtgactcataatatggag

SEQ ID NO: 26819 - DNA, 21 bp, Artificial Sequence
  source: /note="Description of Artificial Sequence: Synthetic oligonucleotide"
actgtgactaatccgcggaat

SEQ ID NO: 26820 - DNA, 21 bp, Artificial Sequence
  source: /note="Description of Artificial Sequence: Synthetic oligonucleotide"
actgtgacgcctgcggtgaat

SEQ ID NO: 26821 - DNA, 21 bp, Artificial Sequence
  source: /note="Description of Artificial Sequence: Synthetic oligonucleotide"
actgtgactcggcatccgtct

SEQ ID NO: 26822 - DNA, 21 bp, Artificial Sequence
  source: /note="Description of Artificial Sequence: Synthetic oligonucleotide"
acggtgactacggctgagcgt

SEQ ID NO: 26823 - DNA, 21 bp, Artificial Sequence
  source: /note="Description of Artificial Sequence: Synthetic oligonucleotide"
acggtgacgacgggtcggtgg

SEQ ID NO: 26824 - DNA, 21 bp, Artificial Sequence
  source: /note="Description of Artificial Sequence: Synthetic oligonucleotide"
acggtgactactcgtcaggcg

SEQ ID NO: 26825 - DNA, 21 bp, Artificial Sequence
  source: /note="Description of Artificial Sequence: Synthetic oligonucleotide"
acggttgtgaagtctggtgat

SEQ ID NO: 26826 - DNA, 21 bp, Artificial Sequence
  source: /note="Description of Artificial Sequence: Synthetic oligonucleotide"
acggttgttctgactagtggg

SEQ ID NO: 26827 - DNA, 21 bp, Artificial Sequence
  source: /note="Description of Artificial Sequence: Synthetic oligonucleotide"
actgttgtgccttctgggcgt

SEQ ID NO: 26828 - DNA, 21 bp, Artificial Sequence
  source: /note="Description of Artificial Sequence: Synthetic oligonucleotide"
acggtggtgccggttcctggg

SEQ ID NO: 26829 - DNA, 21 bp, Artificial Sequence
  source: /note="Description of Artificial Sequence: Synthetic oligonucleotide"
actgtgtattcgggtaggcct

SEQ ID NO: 26830 - DNA, 21 bp, Artificial Sequence
  source: /note="Description of Artificial Sequence: Synthetic oligonucleotide"
actgtttatagtcctaatact

SEQ ID NO: 26831 - DNA, 21 bp, Artificial Sequence
  source: /note="Description of Artificial Sequence: Synthetic oligonucleotide"
acttggaatgctactatgaat

SEQ ID NO: 26832 - DNA, 21 bp, Artificial Sequence
  source: /note="Description of Artificial Sequence: Synthetic oligonucleotide"
acgtggcaggataatagggct

SEQ ID NO: 26833 - DNA, 21 bp, Artificial Sequence
  source: /note="Description of Artificial Sequence: Synthetic oligonucleotide"
acgtggagtgcgactcagggg

SEQ ID NO: 26834 - DNA, 21 bp, Artificial Sequence
  source: /note="Description of Artificial Sequence: Synthetic oligonucleotide"
acttggagttcgggtacggat

SEQ ID NO: 26835 - DNA, 21 bp, Artificial Sequence
  source: /note="Description of Artificial Sequence: Synthetic oligonucleotide"
acgtggtctactaatgtgagt

SEQ ID NO: 26836 - DNA, 21 bp, Artificial Sequence
  source: /note="Description of Artificial Sequence: Synthetic oligonucleotide"
acttatgctattattccggat

SEQ ID NO: 26837 - DNA, 21 bp, Artificial Sequence
  source: /note="Description of Artificial Sequence: Synthetic oligonucleotide"
acttatgctaattcggcgttt

SEQ ID NO: 26838 - DNA, 21 bp, Artificial Sequence
  source: /note="Description of Artificial Sequence: Synthetic oligonucleotide"
acttatgctaatgtttctagt

SEQ ID NO: 26839 - DNA, 21 bp, Artificial Sequence
  source: /note="Description of Artificial Sequence: Synthetic oligonucleotide"
acgtatgctccttctcggggt

SEQ ID NO: 26840 - DNA, 21 bp, Artificial Sequence
  source: /note="Description of Artificial Sequence: Synthetic oligonucleotide"
acttatgcgccggtggagacg

SEQ ID NO: 26841 - DNA, 21 bp, Artificial Sequence
  source: /note="Description of Artificial Sequence: Synthetic oligonucleotide"
acttatgctcggtcgcaggcg

SEQ ID NO: 26842 - DNA, 21 bp, Artificial Sequence
  source: /note="Description of Artificial Sequence: Synthetic oligonucleotide"
acgtatgaggctaggcagctg

SEQ ID NO: 26843 - DNA, 21 bp, Artificial Sequence
  source: /note="Description of Artificial Sequence: Synthetic oligonucleotide"
acttatgagggtaggctgcgg

SEQ ID NO: 26844 - DNA, 21 bp, Artificial Sequence
  source: /note="Description of Artificial Sequence: Synthetic oligonucleotide"
acttatgagctttctccgcct

SEQ ID NO: 26845 - DNA, 21 bp, Artificial Sequence
  source: /note="Description of Artificial Sequence: Synthetic oligonucleotide"
acgtatgaggttcgtcagctt

SEQ ID NO: 26846 - DNA, 21 bp, Artificial Sequence
  source: /note="Description of Artificial Sequence: Synthetic oligonucleotide"
acgtatggggctgcggtgcag

SEQ ID NO: 26847 - DNA, 21 bp, Artificial Sequence
  source: /note="Description of Artificial Sequence: Synthetic oligonucleotide"
acgtatgggggtccgatgatt

SEQ ID NO: 26848 - DNA, 21 bp, Artificial Sequence
  source: /note="Description of Artificial Sequence: Synthetic oligonucleotide"
acgtatggtattcaggctcct

SEQ ID NO: 26849 - DNA, 21 bp, Artificial Sequence
  source: /note="Description of Artificial Sequence: Synthetic oligonucleotide"
acttatggtctttcggtgcct

SEQ ID NO: 26850 - DNA, 21 bp, Artificial Sequence
  source: /note="Description of Artificial Sequence: Synthetic oligonucleotide"
acttatggtatgacgggtgct

SEQ ID NO: 26851 - DNA, 21 bp, Artificial Sequence
  source: /note="Description of Artificial Sequence: Synthetic oligonucleotide"
acttatcatactggtgatggg

SEQ ID NO: 26852 - DNA, 21 bp, Artificial Sequence
  source: /note="Description of Artificial Sequence: Synthetic oligonucleotide"
acgtatattaatacgaatccg

SEQ ID NO: 26853 - DNA, 21 bp, Artificial Sequence
  source: /note="Description of Artificial Sequence: Synthetic oligonucleotide"
acttataaggatgagcagcct

SEQ ID NO: 26854 - DNA, 21 bp, Artificial Sequence
  source: /note="Description of Artificial Sequence: Synthetic oligonucleotide"
acttataagggtgctccgccg

SEQ ID NO: 26855 - DNA, 21 bp, Artificial Sequence
  source: /note="Description of Artificial Sequence: Synthetic oligonucleotide"
acttataagaatcagacgcat

SEQ ID NO: 26856 - DNA, 21 bp, Artificial Sequence
  source: /note="Description of Artificial Sequence: Synthetic oligonucleotide"
acgtatttgattgctacgccg

SEQ ID NO: 26857 - DNA, 21 bp, Artificial Sequence
  source: /note="Description of Artificial Sequence: Synthetic oligonucleotide"
acttatctgtctggggcttat

SEQ ID NO: 26858 - DNA, 21 bp, Artificial Sequence
  source: /note="Description of Artificial Sequence: Synthetic oligonucleotide"
acttatccgctgccgaatgag

SEQ ID NO: 26859 - DNA, 21 bp, Artificial Sequence
  source: /note="Description of Artificial Sequence: Synthetic oligonucleotide"
acgtatcctcctgcggctttg

SEQ ID NO: 26860 - DNA, 21 bp, Artificial Sequence
  source: /note="Description of Artificial Sequence: Synthetic oligonucleotide"
acttatccgacggagcctcgg

SEQ ID NO: 26861 - DNA, 21 bp, Artificial Sequence
  source: /note="Description of Artificial Sequence: Synthetic oligonucleotide"
acgtatcctacgttgcttgat

SEQ ID NO: 26862 - DNA, 21 bp, Artificial Sequence
  source: /note="Description of Artificial Sequence: Synthetic oligonucleotide"
acgtatcaggcttctcttatt

SEQ ID NO: 26863 - DNA, 21 bp, Artificial Sequence
  source: /note="Description of Artificial Sequence: Synthetic oligonucleotide"
acgtatcagtcgcagagtggg

SEQ ID NO: 26864 - DNA, 21 bp, Artificial Sequence
  source: /note="Description of Artificial Sequence: Synthetic oligonucleotide"
acttattctgcggagactatg

SEQ ID NO: 26865 - DNA, 21 bp, Artificial Sequence
  source: /note="Description of Artificial Sequence: Synthetic oligonucleotide"
acgtattctgcggtgctggct

SEQ ID NO: 26866 - DNA, 21 bp, Artificial Sequence
  source: /note="Description of Artificial Sequence: Synthetic oligonucleotide"
acgtattcgcatgctcgggct

SEQ ID NO: 26867 - DNA, 21 bp, Artificial Sequence
  source: /note="Description of Artificial Sequence: Synthetic oligonucleotide"
acgtattcgcctactgctacg

SEQ ID NO: 26868 - DNA, 21 bp, Artificial Sequence
  source: /note="Description of Artificial Sequence: Synthetic oligonucleotide"
acgtattctacggcgatttat

SEQ ID NO: 26869 - DNA, 21 bp, Artificial Sequence
  source: /note="Description of Artificial Sequence: Synthetic oligonucleotide"
acgtattctgtttcgcttgcg

SEQ ID NO: 26870 - DNA, 21 bp, Artificial Sequence
  source: /note="Description of Artificial Sequence: Synthetic oligonucleotide"
acgtatagttattcgagtgct

SEQ ID NO: 26871 - DNA, 21 bp, Artificial Sequence
  source: /note="Description of Artificial Sequence: Synthetic oligonucleotide"
acgtatactgggctggcggcg

SEQ ID NO: 26872 - DNA, 21 bp, Artificial Sequence
  source: /note="Description of Artificial Sequence: Synthetic oligonucleotide"
acgtatacgcatcatagtgtg

SEQ ID NO: 26873 - DNA, 21 bp, Artificial Sequence
  source: /note="Description of Artificial Sequence: Synthetic oligonucleotide"
acgtatacgtctacttatgct

SEQ ID NO: 26874 - DNA, 21 bp, Artificial Sequence
  source: /note="Description of Artificial Sequence: Synthetic oligonucleotide"
acttatgttgatgttcttcat

SEQ ID NO: 26875 - DNA, 21 bp, Artificial Sequence
  source: /note="Description of Artificial Sequence: Synthetic oligonucleotide"
acgtatgttggtaggggggcg

SEQ ID NO: 26876 - DNA, 21 bp, Artificial Sequence
  source: /note="Description of Artificial Sequence: Synthetic oligonucleotide"
acttatgtgatgactcctaag

SEQ ID NO: 26877 - DNA, 21 bp, Artificial Sequence
  source: /note="Description of Artificial Sequence: Synthetic oligonucleotide"
acttattatgcggctgagatt

SEQ ID NO: 26878 - DNA, 21 bp, Artificial Sequence
  source: /note="Description of Artificial Sequence: Synthetic oligonucleotide"
acttattataagaatacgggt

SEQ ID NO: 26879 - DNA, 21 bp, Artificial Sequence
  source: /note="Description of Artificial Sequence: Synthetic oligonucleotide"
gttgctgcggggcagtcgcct

SEQ ID NO: 26880 - DNA, 21 bp, Artificial Sequence
  source: /note="Description of Artificial Sequence: Synthetic oligonucleotide"
gtggcggcgcgttcggcgcag

SEQ ID NO: 26881 - DNA, 21 bp, Artificial Sequence
  source: /note="Description of Artificial Sequence: Synthetic oligonucleotide"
gttgcggatgcgacgaagcct

SEQ ID NO: 26882 - DNA, 21 bp, Artificial Sequence
  source: /note="Description of Artificial Sequence: Synthetic oligonucleotide"
gtggctgattttgttcgttgt

SEQ ID NO: 26883 - DNA, 21 bp, Artificial Sequence
  source: /note="Description of Artificial Sequence: Synthetic oligonucleotide"
gttgcggataaggcgttggtt

SEQ ID NO: 26884 - DNA, 21 bp, Artificial Sequence
  source: /note="Description of Artificial Sequence: Synthetic oligonucleotide"
gtggcggatctgcggccggag

SEQ ID NO: 26885 - DNA, 21 bp, Artificial Sequence
  source: /note="Description of Artificial Sequence: Synthetic oligonucleotide"
gttgctgatcctcctaggtcg

SEQ ID NO: 26886 - DNA, 21 bp, Artificial Sequence
  source: /note="Description of Artificial Sequence: Synthetic oligonucleotide"
gttgctgatcgtttgactact

SEQ ID NO: 26887 - DNA, 21 bp, Artificial Sequence
  source: /note="Description of Artificial Sequence: Synthetic oligonucleotide"
gttgctgagcatcctaagcgg

SEQ ID NO: 26888 - DNA, 21 bp, Artificial Sequence
  source: /note="Description of Artificial Sequence: Synthetic oligonucleotide"
gtggctgagcagcattctctg

SEQ ID NO: 26889 - DNA, 21 bp, Artificial Sequence
  source: /note="Description of Artificial Sequence: Synthetic oligonucleotide"
gttgctggggcgggtacgact

SEQ ID NO: 26890 - DNA, 21 bp, Artificial Sequence
  source: /note="Description of Artificial Sequence: Synthetic oligonucleotide"
gttgctggtgctcatgcgact

SEQ ID NO: 26891 - DNA, 21 bp, Artificial Sequence
  source: /note="Description of Artificial Sequence: Synthetic oligonucleotide"
gtggctggtgatgcgaagaat

SEQ ID NO: 26892 - DNA, 21 bp, Artificial Sequence
  source: /note="Description of Artificial Sequence: Synthetic oligonucleotide"
gttgcgggtattcggagtcag

SEQ ID NO: 26893 - DNA, 21 bp, Artificial Sequence
  source: /note="Description of Artificial Sequence: Synthetic oligonucleotide"
gttgctgggttgaatcatcgt

SEQ ID NO: 26894 - DNA, 21 bp, Artificial Sequence
  source: /note="Description of Artificial Sequence: Synthetic oligonucleotide"
gtggcggggccgactggtcct

SEQ ID NO: 26895 - DNA, 21 bp, Artificial Sequence
  source: /note="Description of Artificial Sequence: Synthetic oligonucleotide"
gtggctggtcagaggagtggt

SEQ ID NO: 26896 - DNA, 21 bp, Artificial Sequence
  source: /note="Description of Artificial Sequence: Synthetic oligonucleotide"
gtggcggggcagtcgcctcct

SEQ ID NO: 26897 - DNA, 21 bp, Artificial Sequence
  source: /note="Description of Artificial Sequence: Synthetic oligonucleotide"
gttgctgggcgggatcagccg

SEQ ID NO: 26898 - DNA, 21 bp, Artificial Sequence
  source: /note="Description of Artificial Sequence: Synthetic oligonucleotide"
gtggcggggcgtgatgtgcgg

SEQ ID NO: 26899 - DNA, 21 bp, Artificial Sequence
  source: /note="Description of Artificial Sequence: Synthetic oligonucleotide"
gttgcggggcgggattatcag

SEQ ID NO: 26900 - DNA, 21 bp, Artificial Sequence
  source: /note="Description of Artificial Sequence: Synthetic oligonucleotide"
gtggctgggagtgcgacggtt

SEQ ID NO: 26901 - DNA, 21 bp, Artificial Sequence
  source: /note="Description of Artificial Sequence: Synthetic oligonucleotide"
gttgctggtactgttgagcgt

SEQ ID NO: 26902 - DNA, 21 bp, Artificial Sequence
  source: /note="Description of Artificial Sequence: Synthetic oligonucleotide"
gtggcgggtgtgaggactgct

SEQ ID NO: 26903 - DNA, 21 bp, Artificial Sequence
  source: /note="Description of Artificial Sequence: Synthetic oligonucleotide"
gttgctggtgtttcggagatg

SEQ ID NO: 26904 - DNA, 21 bp, Artificial Sequence
  source: /note="Description of Artificial Sequence: Synthetic oligonucleotide"
gttgcgcatcttagtatgtcg

SEQ ID NO: 26905 - DNA, 21 bp, Artificial Sequence
  source: /note="Description of Artificial Sequence: Synthetic oligonucleotide"
gtggctcattcgttgcctgct

SEQ ID NO: 26906 - DNA, 21 bp, Artificial Sequence
  source: /note="Description of Artificial Sequence: Synthetic oligonucleotide"
gtggcgcattctactaatgct

SEQ ID NO: 26907 - DNA, 21 bp, Artificial Sequence
  source: /note="Description of Artificial Sequence: Synthetic oligonucleotide"
gttgctcatactggggctcgg

SEQ ID NO: 26908 - DNA, 21 bp, Artificial Sequence
  source: /note="Description of Artificial Sequence: Synthetic oligonucleotide"
gttgctcatacggtgtattcg

SEQ ID NO: 26909 - DNA, 21 bp, Artificial Sequence
  source: /note="Description of Artificial Sequence: Synthetic oligonucleotide"
gttgctcatgtgcagagtgat

SEQ ID NO: 26910 - DNA, 21 bp, Artificial Sequence
  source: /note="Description of Artificial Sequence: Synthetic oligonucleotide"
gttgcgcattatccggctagt

SEQ ID NO: 26911 - DNA, 21 bp, Artificial Sequence
  source: /note="Description of Artificial Sequence: Synthetic oligonucleotide"
gttgcgattcatggtgctgtt

SEQ ID NO: 26912 - DNA, 21 bp, Artificial Sequence
  source: /note="Description of Artificial Sequence: Synthetic oligonucleotide"
gttgcgattccgcgtgggtct

SEQ ID NO: 26913 - DNA, 21 bp, Artificial Sequence
  source: /note="Description of Artificial Sequence: Synthetic oligonucleotide"
gtggcgattcgtagtcctgct

SEQ ID NO: 26914 - DNA, 21 bp, Artificial Sequence
  source: /note="Description of Artificial Sequence: Synthetic oligonucleotide"
gtggcgcttgcggggcagtat

SEQ ID NO: 26915 - DNA, 21 bp, Artificial Sequence
  source: /note="Description of Artificial Sequence: Synthetic oligonucleotide"
gtggctctgcatcctttgaat

SEQ ID NO: 26916 - DNA, 21 bp, Artificial Sequence
  source: /note="Description of Artificial Sequence: Synthetic oligonucleotide"
gtggcgctgattaagtatagt

SEQ ID NO: 26917 - DNA, 21 bp, Artificial Sequence
  source: /note="Description of Artificial Sequence: Synthetic oligonucleotide"
gtggctttgtctgcggctaag

SEQ ID NO: 26918 - DNA, 21 bp, Artificial Sequence
  source: /note="Description of Artificial Sequence: Synthetic oligonucleotide"
gttgcgaatgagacgcattat

SEQ ID NO: 26919 - DNA, 21 bp, Artificial Sequence
  source: /note="Description of Artificial Sequence: Synthetic oligonucleotide"
gtggctaatggtaagtctcat

SEQ ID NO: 26920 - DNA, 21 bp, Artificial Sequence
  source: /note="Description of Artificial Sequence: Synthetic oligonucleotide"
gttgctaatcatattgaggtt

SEQ ID NO: 26921 - DNA, 21 bp, Artificial Sequence
  source: /note="Description of Artificial Sequence: Synthetic oligonucleotide"
gtggctaatcagcaggggacg

SEQ ID NO: 26922 - DNA, 21 bp, Artificial Sequence
  source: /note="Description of Artificial Sequence: Synthetic oligonucleotide"
gtggcgaatagggatgtgcag

SEQ ID NO: 26923 - DNA, 21 bp, Artificial Sequence
  source: /note="Description of Artificial Sequence: Synthetic oligonucleotide"
gttgctaatgtgcttacgaat

SEQ ID NO: 26924 - DNA, 21 bp, Artificial Sequence
  source: /note="Description of Artificial Sequence: Synthetic oligonucleotide"
gttgcgccggcgattcctggt

SEQ ID NO: 26925 - DNA, 21 bp, Artificial Sequence
  source: /note="Description of Artificial Sequence: Synthetic oligonucleotide"
gttgctcctattgggtctgag

SEQ ID NO: 26926 - DNA, 21 bp, Artificial Sequence
  source: /note="Description of Artificial Sequence: Synthetic oligonucleotide"
gttgcgccgcttattccgaag

SEQ ID NO: 26927 - DNA, 21 bp, Artificial Sequence
  source: /note="Description of Artificial Sequence: Synthetic oligonucleotide"
gttgctcctcctcctcagaag

SEQ ID NO: 26928 - DNA, 21 bp, Artificial Sequence
  source: /note="Description of Artificial Sequence: Synthetic oligonucleotide"
gttgctcctccgcctaggcat

SEQ ID NO: 26929 - DNA, 21 bp, Artificial Sequence
  source: /note="Description of Artificial Sequence: Synthetic oligonucleotide"
gttgcgccgccgtattctggt

SEQ ID NO: 26930 - DNA, 21 bp, Artificial Sequence
  source: /note="Description of Artificial Sequence: Synthetic oligonucleotide"
gtggcgccgtctgagggtagt

SEQ ID NO: 26931 - DNA, 21 bp, Artificial Sequence
  source: /note="Description of Artificial Sequence: Synthetic oligonucleotide"
gttgcgccgtcgcagcggttg

SEQ ID NO: 26932 - DNA, 21 bp, Artificial Sequence
  source: /note="Description of Artificial Sequence: Synthetic oligonucleotide"
gttgcgcagcgttcgggtccg

SEQ ID NO: 26933 - DNA, 21 bp, Artificial Sequence
  source: /note="Description of Artificial Sequence: Synthetic oligonucleotide"
gtggctcagagtcggagtatt

SEQ ID NO: 26934 - DNA, 21 bp, Artificial Sequence
  source: /note="Description of Artificial Sequence: Synthetic oligonucleotide"
gttgcgcgggctcatattgtg

SEQ ID NO: 26935 - DNA, 21 bp, Artificial Sequence
  source: /note="Description of Artificial Sequence: Synthetic oligonucleotide"
gttgcgagggggccgactact

SEQ ID NO: 26936 - DNA, 21 bp, Artificial Sequence
  source: /note="Description of Artificial Sequence: Synthetic oligonucleotide"
gtggcgaggcattctaatgag

SEQ ID NO: 26937 - DNA, 21 bp, Artificial Sequence
  source: /note="Description of Artificial Sequence: Synthetic oligonucleotide"
gttgctaggattgatgggatg

SEQ ID NO: 26938 - DNA, 21 bp, Artificial Sequence
  source: /note="Description of Artificial Sequence: Synthetic oligonucleotide"
gttgcgcggctgcctcaggtt

SEQ ID NO: 26939 - DNA, 21 bp, Artificial Sequence
  source: /note="Description of Artificial Sequence: Synthetic oligonucleotide"
gttgctcggccgctttcgatg

SEQ ID NO: 26940 - DNA, 21 bp, Artificial Sequence
  source: /note="Description of Artificial Sequence: Synthetic oligonucleotide"
gttgcgaggagtggtacgact

SEQ ID NO: 26941 - DNA, 21 bp, Artificial Sequence
  source: /note="Description of Artificial Sequence: Synthetic oligonucleotide"
gttgctaggtcgcttcaggct

SEQ ID NO: 26942 - DNA, 21 bp, Artificial Sequence
  source: /note="Description of Artificial Sequence: Synthetic oligonucleotide"
gtggcgcggtctaatttggat

SEQ ID NO: 26943 - DNA, 21 bp, Artificial Sequence
  source: /note="Description of Artificial Sequence: Synthetic oligonucleotide"
gttgcgtcggcgttgggtggt

SEQ ID NO: 26944 - DNA, 21 bp, Artificial Sequence
  source: /note="Description of Artificial Sequence: Synthetic oligonucleotide"
gtggcgagtgcgtcgccggcg

SEQ ID NO: 26945 - DNA, 21 bp, Artificial Sequence
  source: /note="Description of Artificial Sequence: Synthetic oligonucleotide"
gttgcgagtggtgtggttttt

SEQ ID NO: 26946 - DNA, 21 bp, Artificial Sequence
  source: /note="Description of Artificial Sequence: Synthetic oligonucleotide"
gtggcgtcgcatattactcct

SEQ ID NO: 26947 - DNA, 21 bp, Artificial Sequence
  source: /note="Description of Artificial Sequence: Synthetic oligonucleotide"
gttgcgtcgaagattattgat

SEQ ID NO: 26948 - DNA, 21 bp, Artificial Sequence
  source: /note="Description of Artificial Sequence: Synthetic oligonucleotide"
gtggcttcgttgcaggttggg

SEQ ID NO: 26949 - DNA, 21 bp, Artificial Sequence
  source: /note="Description of Artificial Sequence: Synthetic oligonucleotide"
gtggcttcgttgacgcatgat

SEQ ID NO: 26950 - DNA, 21 bp, Artificial Sequence
  source: /note="Description of Artificial Sequence: Synthetic oligonucleotide"
gttgctagtaataataaggcg

SEQ ID NO: 26951 - DNA, 21 bp, Artificial Sequence
  source: /note="Description of Artificial Sequence: Synthetic oligonucleotide"
gtggcttcgagggctcctact

SEQ ID NO: 26952 - DNA, 21 bp, Artificial Sequence
  source: /note="Description of Artificial Sequence: Synthetic oligonucleotide"
gtggctagttctaagactcct

SEQ ID NO: 26953 - DNA, 21 bp, Artificial Sequence
  source: /note="Description of Artificial Sequence: Synthetic oligonucleotide"
gttgctagttcttctgggatt

SEQ ID NO: 26954 - DNA, 21 bp, Artificial Sequence
  source: /note="Description of Artificial Sequence: Synthetic oligonucleotide"
gttgcgagtacggggtctccg

SEQ ID NO: 26955 - DNA, 21 bp, Artificial Sequence
  source: /note="Description of Artificial Sequence: Synthetic oligonucleotide"
gtggcttcggtgaagatgttg

SEQ ID NO: 26956 - DNA, 21 bp, Artificial Sequence
  source: /note="Description of Artificial Sequence: Synthetic oligonucleotide"
gtggcgtctgtgaggacgaat

SEQ ID NO: 26957 - DNA, 21 bp, Artificial Sequence
  source: /note="Description of Artificial Sequence: Synthetic oligonucleotide"
gttgcttcttattcgggtttt

SEQ ID NO: 26958 - DNA, 21 bp, Artificial Sequence
  source: /note="Description of Artificial Sequence: Synthetic oligonucleotide"
gtggctagttattcgcgggag

SEQ ID NO: 26959 - DNA, 21 bp, Artificial Sequence
  source: /note="Description of Artificial Sequence: Synthetic oligonucleotide"
gttgcgactgcttctgttacg

SEQ ID NO: 26960 - DNA, 21 bp, Artificial Sequence
  source: /note="Description of Artificial Sequence: Synthetic oligonucleotide"
gttgcgacggagctggctggg

SEQ ID NO: 26961 - DNA, 21 bp, Artificial Sequence
  source: /note="Description of Artificial Sequence: Synthetic oligonucleotide"
gtggctactctgaattatgtt

SEQ ID NO: 26962 - DNA, 21 bp, Artificial Sequence
  source: /note="Description of Artificial Sequence: Synthetic oligonucleotide"
gttgcgacgctgcgtggtaat

SEQ ID NO: 26963 - DNA, 21 bp, Artificial Sequence
  source: /note="Description of Artificial Sequence: Synthetic oligonucleotide"
gttgctactatggttgtgccg

SEQ ID NO: 26964 - DNA, 21 bp, Artificial Sequence
  source: /note="Description of Artificial Sequence: Synthetic oligonucleotide"
gtggctactaataatgatgtg

SEQ ID NO: 26965 - DNA, 21 bp, Artificial Sequence
  source: /note="Description of Artificial Sequence: Synthetic oligonucleotide"
gttgcgacgaatagtatttct

SEQ ID NO: 26966 - DNA, 21 bp, Artificial Sequence
  source: /note="Description of Artificial Sequence: Synthetic oligonucleotide"
gttgctactaatacgtatctt

SEQ ID NO: 26967 - DNA, 21 bp, Artificial Sequence
  source: /note="Description of Artificial Sequence: Synthetic oligonucleotide"
gttgctactccgacggttttg

SEQ ID NO: 26968 - DNA, 21 bp, Artificial Sequence
  source: /note="Description of Artificial Sequence: Synthetic oligonucleotide"
gtggcgacgcgggattcgtat

SEQ ID NO: 26969 - DNA, 21 bp, Artificial Sequence
  source: /note="Description of Artificial Sequence: Synthetic oligonucleotide"
gttgcgacgcgggttgtggag

SEQ ID NO: 26970 - DNA, 21 bp, Artificial Sequence
  source: /note="Description of Artificial Sequence: Synthetic oligonucleotide"
gtggcgacgtctgttcggccg

SEQ ID NO: 26971 - DNA, 21 bp, Artificial Sequence
  source: /note="Description of Artificial Sequence: Synthetic oligonucleotide"
gttgctgtgatgatgccttcg

SEQ ID NO: 26972 - DNA, 21 bp, Artificial Sequence
  source: /note="Description of Artificial Sequence: Synthetic oligonucleotide"
gttgctgttaattctcgtagt

SEQ ID NO: 26973 - DNA, 21 bp, Artificial Sequence
  source: /note="Description of Artificial Sequence: Synthetic oligonucleotide"
gttgcggttaggacgtctgat

SEQ ID NO: 26974 - DNA, 21 bp, Artificial Sequence
  source: /note="Description of Artificial Sequence: Synthetic oligonucleotide"
gttgctgtgtcggcgcctctt

SEQ ID NO: 26975 - DNA, 21 bp, Artificial Sequence
  source: /note="Description of Artificial Sequence: Synthetic oligonucleotide"
gtggctgtgagtactgttacg

SEQ ID NO: 26976 - DNA, 21 bp, Artificial Sequence
  source: /note="Description of Artificial Sequence: Synthetic oligonucleotide"
gtggcttatgatactgcggtg

SEQ ID NO: 26977 - DNA, 21 bp, Artificial Sequence
  source: /note="Description of Artificial Sequence: Synthetic oligonucleotide"
gttgcttatccggctcgtagt

SEQ ID NO: 26978 - DNA, 21 bp, Artificial Sequence
  source: /note="Description of Artificial Sequence: Synthetic oligonucleotide"
gtttgtggtcctccttttcat

SEQ ID NO: 26979 - DNA, 21 bp, Artificial Sequence
  source: /note="Description of Artificial Sequence: Synthetic oligonucleotide"
gtttgtaatagtgttggttat

SEQ ID NO: 26980 - DNA, 21 bp, Artificial Sequence
  source: /note="Description of Artificial Sequence: Synthetic oligonucleotide"
gttgatgcgaaggcgaatgat

SEQ ID NO: 26981 - DNA, 21 bp, Artificial Sequence
  source: /note="Description of Artificial Sequence: Synthetic oligonucleotide"
gtggatgattttcctaggtgt

SEQ ID NO: 26982 - DNA, 21 bp, Artificial Sequence
  source: /note="Description of Artificial Sequence: Synthetic oligonucleotide"
gttgatgatttgcgggctcgg

SEQ ID NO: 26983 - DNA, 21 bp, Artificial Sequence
  source: /note="Description of Artificial Sequence: Synthetic oligonucleotide"
gttgatgagattcgtcgtccg

SEQ ID NO: 26984 - DNA, 21 bp, Artificial Sequence
  source: /note="Description of Artificial Sequence: Synthetic oligonucleotide"
gttgattttgagcattctcag

SEQ ID NO: 26985 - DNA, 21 bp, Artificial Sequence
  source: /note="Description of Artificial Sequence: Synthetic oligonucleotide"
gttgatggtgcgcggcagcct

SEQ ID NO: 26986 - DNA, 21 bp, Artificial Sequence
  source: /note="Description of Artificial Sequence: Synthetic oligonucleotide"
gtggatggtctgggttctaag

SEQ ID NO: 26987 - DNA, 21 bp, Artificial Sequence
  source: /note="Description of Artificial Sequence: Synthetic oligonucleotide"
gtggatggtgtgcgtggggct

SEQ ID NO: 26988 - DNA, 21 bp, Artificial Sequence
  source: /note="Description of Artificial Sequence: Synthetic oligonucleotide"
gtggataagctttctcatact

SEQ ID NO: 26989 - DNA, 21 bp, Artificial Sequence
  source: /note="Description of Artificial Sequence: Synthetic oligonucleotide"
gtggataagcctcatcttgcg

SEQ ID NO: 26990 - DNA, 21 bp, Artificial Sequence
  source: /note="Description of Artificial Sequence: Synthetic oligonucleotide"
gttgatctgcagtgtgcgccg

SEQ ID NO: 26991 - DNA, 21 bp, Artificial Sequence
  source: /note="Description of Artificial Sequence: Synthetic oligonucleotide"
gttgatcttcggccttatgcg

SEQ ID NO: 26992 - DNA, 21 bp, Artificial Sequence
  source: /note="Description of Artificial Sequence: Synthetic oligonucleotide"
gtggataatgctgcgcagagt

SEQ ID NO: 26993 - DNA, 21 bp, Artificial Sequence
  source: /note="Description of Artificial Sequence: Synthetic oligonucleotide"
gtggataatcttgctcgtgct

SEQ ID NO: 26994 - DNA, 21 bp, Artificial Sequence
  source: /note="Description of Artificial Sequence: Synthetic oligonucleotide"
gtggataatactttgactgat

SEQ ID NO: 26995 - DNA, 21 bp, Artificial Sequence
  source: /note="Description of Artificial Sequence: Synthetic oligonucleotide"
gttgatcctgggcgtcatcat

SEQ ID NO: 26996 - DNA, 21 bp, Artificial Sequence
  source: /note="Description of Artificial Sequence: Synthetic oligonucleotide"
gttgatccgatgcctgctctt

SEQ ID NO: 26997 - DNA, 21 bp, Artificial Sequence
  source: /note="Description of Artificial Sequence: Synthetic oligonucleotide"
gtggatccgcggtggcatccg

SEQ ID NO: 26998 - DNA, 21 bp, Artificial Sequence
  source: /note="Description of Artificial Sequence: Synthetic oligonucleotide"
gtggatcagcatactattgcg

SEQ ID NO: 26999 - DNA, 21 bp, Artificial Sequence
  source: /note="Description of Artificial Sequence: Synthetic oligonucleotide"
gttgatcaggtgaataatccg

SEQ ID NO: 27000 - DNA, 21 bp, Artificial Sequence
  source: /note="Description of Artificial Sequence: Synthetic oligonucleotide"
gtggataggcatcattcgccg

SEQ ID NO: 27001 - DNA, 21 bp, Artificial Sequence
  source: /note="Description of Artificial Sequence: Synthetic oligonucleotide"
gtggatcgtaggcctgattcg

SEQ ID NO: 27002 - DNA, 21 bp, Artificial Sequence
  source: /note="Description of Artificial Sequence: Synthetic oligonucleotide"
gtggataggcggactacgacg

SEQ ID NO: 27003 - DNA, 21 bp, Artificial Sequence
  source: /note="Description of Artificial Sequence: Synthetic oligonucleotide"
gtggattctttgacgccgtat

SEQ ID NO: 27004 - DNA, 21 bp, Artificial Sequence
  source: /note="Description of Artificial Sequence: Synthetic oligonucleotide"
gtggattctccgtcggctcct

SEQ ID NO: 27005 - DNA, 21 bp, Artificial Sequence
  source: /note="Description of Artificial Sequence: Synthetic oligonucleotide"
gtggatagttcgactaatctg

SEQ ID NO: 27006 - DNA, 21 bp, Artificial Sequence
  source: /note="Description of Artificial Sequence: Synthetic oligonucleotide"
gttgatactcttatgaatcgt

SEQ ID NO: 27007 - DNA, 21 bp, Artificial Sequence
  source: /note="Description of Artificial Sequence: Synthetic oligonucleotide"
gttgatactcctgggaatagg

SEQ ID NO: 27008 - DNA, 21 bp, Artificial Sequence
  source: /note="Description of Artificial Sequence: Synthetic oligonucleotide"
gttgatacgaggagggagtct

SEQ ID NO: 27009 - DNA, 21 bp, Artificial Sequence
  source: /note="Description of Artificial Sequence: Synthetic oligonucleotide"
gttgatacttcgctggagtgt

SEQ ID NO: 27010 - DNA, 21 bp, Artificial Sequence
  source: /note="Description of Artificial Sequence: Synthetic oligonucleotide"
gtggatactacgaagtttcag

SEQ ID NO: 27011 - DNA, 21 bp, Artificial Sequence
  source: /note="Description of Artificial Sequence: Synthetic oligonucleotide"
gttgatgttcgtaagcatcct

SEQ ID NO: 27012 - DNA, 21 bp, Artificial Sequence
  source: /note="Description of Artificial Sequence: Synthetic oligonucleotide"
gttgattatgcggttagtatg

SEQ ID NO: 27013 - DNA, 21 bp, Artificial Sequence
  source: /note="Description of Artificial Sequence: Synthetic oligonucleotide"
gtggaggcgacgagtcgggtg

SEQ ID NO: 27014 - DNA, 21 bp, Artificial Sequence
  source: /note="Description of Artificial Sequence: Synthetic oligonucleotide"
gttgagggggtgcggtctgcg

SEQ ID NO: 27015 - DNA, 21 bp, Artificial Sequence
  source: /note="Description of Artificial Sequence: Synthetic oligonucleotide"
gtggagcataattcgcttaat

SEQ ID NO: 27016 - DNA, 21 bp, Artificial Sequence
  source: /note="Description of Artificial Sequence: Synthetic oligonucleotide"
gttgagcataatactcctttt

SEQ ID NO: 27017 - DNA, 21 bp, Artificial Sequence
  source: /note="Description of Artificial Sequence: Synthetic oligonucleotide"
gtggagcatagggttagtact

SEQ ID NO: 27018 - DNA, 21 bp, Artificial Sequence
  source: /note="Description of Artificial Sequence: Synthetic oligonucleotide"
gttgagcattctactaatgtt

SEQ ID NO: 27019 - DNA, 21 bp, Artificial Sequence
  source: /note="Description of Artificial Sequence: Synthetic oligonucleotide"
gttgagattaagactcgtagt

SEQ ID NO: 27020 - DNA, 21 bp, Artificial Sequence
  source: /note="Description of Artificial Sequence: Synthetic oligonucleotide"
gttgagatttcgtctgtgtcg

SEQ ID NO: 27021 - DNA, 21 bp, Artificial Sequence
  source: /note="Description of Artificial Sequence: Synthetic oligonucleotide"
gttgagaaggagatgaattcg

SEQ ID NO: 27022 - DNA, 21 bp, Artificial Sequence
  source: /note="Description of Artificial Sequence: Synthetic oligonucleotide"
gtggagaagacgccgatggag

SEQ ID NO: 27023 - DNA, 21 bp, Artificial Sequence
  source: /note="Description of Artificial Sequence: Synthetic oligonucleotide"
gttgagaaggtttctatgttg

SEQ ID NO: 27024 - DNA, 21 bp, Artificial Sequence
  source: /note="Description of Artificial Sequence: Synthetic oligonucleotide"
gttgagaagtataagaatttg

SEQ ID NO: 27025 - DNA, 21 bp, Artificial Sequence
  source: /note="Description of Artificial Sequence: Synthetic oligonucleotide"
gttgagttgaatcagggtgat

SEQ ID NO: 27026 - DNA, 21 bp, Artificial Sequence
  source: /note="Description of Artificial Sequence: Synthetic oligonucleotide"
gtggagaatgctaggcctcag

SEQ ID NO: 27027 - DNA, 21 bp, Artificial Sequence
  source: /note="Description of Artificial Sequence: Synthetic oligonucleotide"
gtggagccggcgtttactgat

SEQ ID NO: 27028 - DNA, 21 bp, Artificial Sequence
  source: /note="Description of Artificial Sequence: Synthetic oligonucleotide"
gtggagccgaggaagtcggct

SEQ ID NO: 27029 - DNA, 21 bp, Artificial Sequence
  source: /note="Description of Artificial Sequence: Synthetic oligonucleotide"
gttgagccgcggtcgatgtat

SEQ ID NO: 27030 - DNA, 21 bp, Artificial Sequence
  source: /note="Description of Artificial Sequence: Synthetic oligonucleotide"
gttgagcctactttgacgcgt

SEQ ID NO: 27031 - DNA, 21 bp, Artificial Sequence
  source: /note="Description of Artificial Sequence: Synthetic oligonucleotide"
gtggagcctgttctgcatacg

SEQ ID NO: 27032 - DNA, 21 bp, Artificial Sequence
  source: /note="Description of Artificial Sequence: Synthetic oligonucleotide"
gttgagcgggatgatcggacg

SEQ ID NO: 27033 - DNA, 21 bp, Artificial Sequence
  source: /note="Description of Artificial Sequence: Synthetic oligonucleotide"
gtggagcgtgatattgattct

SEQ ID NO: 27034 - DNA, 21 bp, Artificial Sequence
  source: /note="Description of Artificial Sequence: Synthetic oligonucleotide"
gttgagaggcctgtgaataag

SEQ ID NO: 27035 - DNA, 21 bp, Artificial Sequence
  source: /note="Description of Artificial Sequence: Synthetic oligonucleotide"
gttgagcgtgttaggacgctt

SEQ ID NO: 27036 - DNA, 21 bp, Artificial Sequence
  source: /note="Description of Artificial Sequence: Synthetic oligonucleotide"
gttgagtctgatacgtcgtgg

SEQ ID NO: 27037 - DNA, 21 bp, Artificial Sequence
  source: /note="Description of Artificial Sequence: Synthetic oligonucleotide"
gttgagtcgaattcgcctatg

SEQ ID NO: 27038 - DNA, 21 bp, Artificial Sequence
  source: /note="Description of Artificial Sequence: Synthetic oligonucleotide"
gttgagtcgaatagttctttt

SEQ ID NO: 27039 - DNA, 21 bp, Artificial Sequence
  source: /note="Description of Artificial Sequence: Synthetic oligonucleotide"
gttgagagtagtcctttgccg

SEQ ID NO: 27040 - DNA, 21 bp, Artificial Sequence
  source: /note="Description of Artificial Sequence: Synthetic oligonucleotide"
gttgagacggggcataataag

SEQ ID NO: 27041 - DNA, 21 bp, Artificial Sequence
  source: /note="Description of Artificial Sequence: Synthetic oligonucleotide"
gtggagacgaatcggaatcgt

SEQ ID NO: 27042 - DNA, 21 bp, Artificial Sequence
  source: /note="Description of Artificial Sequence: Synthetic oligonucleotide"
gttgagactaatgtgaagttg

SEQ ID NO: 27043 - DNA, 21 bp, Artificial Sequence
  source: /note="Description of Artificial Sequence: Synthetic oligonucleotide"
gtggagactccgttgcgtaag

SEQ ID NO: 27044 - DNA, 21 bp, Artificial Sequence
  source: /note="Description of Artificial Sequence: Synthetic oligonucleotide"
gttgaggtgaatacgctgcat

SEQ ID NO: 27045 - DNA, 21 bp, Artificial Sequence
  source: /note="Description of Artificial Sequence: Synthetic oligonucleotide"
gtgtttgataatactgtgcgt

SEQ ID NO: 27046 - DNA, 21 bp, Artificial Sequence
  source: /note="Description of Artificial Sequence: Synthetic oligonucleotide"
gtttttggtgctaatgtggcg

SEQ ID NO: 27047 - DNA, 21 bp, Artificial Sequence
  source: /note="Description of Artificial Sequence: Synthetic oligonucleotide"
gtttttggggatacgttgttg

SEQ ID NO: 27048 - DNA, 21 bp, Artificial Sequence
  source: /note="Description of Artificial Sequence: Synthetic oligonucleotide"
gtgtttgggattccgtcgccg

SEQ ID NO: 27049 - DNA, 21 bp, Artificial Sequence
  source: /note="Description of Artificial Sequence: Synthetic oligonucleotide"
gtttttcataaggggtttgat

SEQ ID NO: 27050 - DNA, 21 bp, Artificial Sequence
  source: /note="Description of Artificial Sequence: Synthetic oligonucleotide"
gtgtttcataagtctgagact

SEQ ID NO: 27051 - DNA, 21 bp, Artificial Sequence
  source: /note="Description of Artificial Sequence: Synthetic oligonucleotide"
gtttttcatactccggagcct

SEQ ID NO: 27052 - DNA, 21 bp, Artificial Sequence
  source: /note="Description of Artificial Sequence: Synthetic oligonucleotide"
gtttttttggagcctagttct

SEQ ID NO: 27053 - DNA, 21 bp, Artificial Sequence
  source: /note="Description of Artificial Sequence: Synthetic oligonucleotide"
gtttttccgcagtctacgccg

SEQ ID NO: 27054 - DNA, 21 bp, Artificial Sequence
  source: /note="Description of Artificial Sequence: Synthetic oligonucleotide"
gtgtttcaggatagtattccg

SEQ ID NO: 27055 - DNA, 21 bp, Artificial Sequence
  source: /note="Description of Artificial Sequence: Synthetic oligonucleotide"
gtgtttcaggggcagattgtg

SEQ ID NO: 27056 - DNA, 21 bp, Artificial Sequence
  source: /note="Description of Artificial Sequence: Synthetic oligonucleotide"
gtgtttcagactaataatgct

SEQ ID NO: 27057 - DNA, 21 bp, Artificial Sequence
  source: /note="Description of Artificial Sequence: Synthetic oligonucleotide"
gtttttcgtactacttcgcct

SEQ ID NO: 27058 - DNA, 21 bp, Artificial Sequence
  source: /note="Description of Artificial Sequence: Synthetic oligonucleotide"
gtttttagtgggcgtcaggcg

SEQ ID NO: 27059 - DNA, 21 bp, Artificial Sequence
  source: /note="Description of Artificial Sequence: Synthetic oligonucleotide"
gtgttttcgaattctgctgtt

SEQ ID NO: 27060 - DNA, 21 bp, Artificial Sequence
  source: /note="Description of Artificial Sequence: Synthetic oligonucleotide"
gtgtttactcatgagcggacg

SEQ ID NO: 27061 - DNA, 21 bp, Artificial Sequence
  source: /note="Description of Artificial Sequence: Synthetic oligonucleotide"
gtttttacgcattctgatcct

SEQ ID NO: 27062 - DNA, 21 bp, Artificial Sequence
  source: /note="Description of Artificial Sequence: Synthetic oligonucleotide"
gtttttacgaatccgcgtttg

SEQ ID NO: 27063 - DNA, 21 bp, Artificial Sequence
  source: /note="Description of Artificial Sequence: Synthetic oligonucleotide"
gtttttactccggaggagcgt

SEQ ID NO: 27064 - DNA, 21 bp, Artificial Sequence
  source: /note="Description of Artificial Sequence: Synthetic oligonucleotide"
gtgtttacgtcggtgactacg

SEQ ID NO: 27065 - DNA, 21 bp, Artificial Sequence
  source: /note="Description of Artificial Sequence: Synthetic oligonucleotide"
gtttttactacggggagtccg

SEQ ID NO: 27066 - DNA, 21 bp, Artificial Sequence
  source: /note="Description of Artificial Sequence: Synthetic oligonucleotide"
gtttttgtgggtctgaagccg

SEQ ID NO: 27067 - DNA, 21 bp, Artificial Sequence
  source: /note="Description of Artificial Sequence: Synthetic oligonucleotide"
gttggtgcggctagtgagagg

SEQ ID NO: 27068 - DNA, 21 bp, Artificial Sequence
  source: /note="Description of Artificial Sequence: Synthetic oligonucleotide"
gttggggctgatacgcgtgat

SEQ ID NO: 27069 - DNA, 21 bp, Artificial Sequence
  source: /note="Description of Artificial Sequence: Synthetic oligonucleotide"
gttggtgcgcctaatcggact

SEQ ID NO: 27070 - DNA, 21 bp, Artificial Sequence
  source: /note="Description of Artificial Sequence: Synthetic oligonucleotide"
gttggggcgcctgttgagcgt

SEQ ID NO: 27071 - DNA, 21 bp, Artificial Sequence
  source: /note="Description of Artificial Sequence: Synthetic oligonucleotide"
gtgggtgctagggcgccggct

SEQ ID NO: 27072 - DNA, 21 bp, Artificial Sequence
  source: /note="Description of Artificial Sequence: Synthetic oligonucleotide"
gtgggtgctagtcatgcgaag

SEQ ID NO: 27073 - DNA, 21 bp, Artificial Sequence
  source: /note="Description of Artificial Sequence: Synthetic oligonucleotide"
gttggggctgtgtatagtcag

SEQ ID NO: 27074 - DNA, 21 bp, Artificial Sequence
  source: /note="Description of Artificial Sequence: Synthetic oligonucleotide"
gttggtgatgatagtgtgctt

SEQ ID NO: 27075 - DNA, 21 bp, Artificial Sequence
  source: /note="Description of Artificial Sequence: Synthetic oligonucleotide"
gtgggtgagattatggctatg

SEQ ID NO: 27076 - DNA, 21 bp, Artificial Sequence
  source: /note="Description of Artificial Sequence: Synthetic oligonucleotide"
gttggggagcgtagtagtcgt

SEQ ID NO: 27077 - DNA, 21 bp, Artificial Sequence
  source: /note="Description of Artificial Sequence: Synthetic oligonucleotide"
gtgggtggtgatgatgatatg

SEQ ID NO: 27078 - DNA, 21 bp, Artificial Sequence
  source: /note="Description of Artificial Sequence: Synthetic oligonucleotide"
gttggtggtgatctttgtgat

SEQ ID NO: 27079 - DNA, 21 bp, Artificial Sequence
  source: /note="Description of Artificial Sequence: Synthetic oligonucleotide"
gttgggggtgatagtgtgcct

SEQ ID NO: 27080 - DNA, 21 bp, Artificial Sequence
  source: /note="Description of Artificial Sequence: Synthetic oligonucleotide"
gtggggggtggtcatgggacg

SEQ ID NO: 27081 - DNA, 21 bp, Artificial Sequence
  source: /note="Description of Artificial Sequence: Synthetic oligonucleotide"
gtgggtggtggtactgggccg

SEQ ID NO: 27082 - DNA, 21 bp, Artificial Sequence
  source: /note="Description of Artificial Sequence: Synthetic oligonucleotide"
gttggtgggatggatcttacg

SEQ ID NO: 27083 - DNA, 21 bp, Artificial Sequence
  source: /note="Description of Artificial Sequence: Synthetic oligonucleotide"
gtgggggggccgattggttat

SEQ ID NO: 27084 - DNA, 21 bp, Artificial Sequence
  source: /note="Description of Artificial Sequence: Synthetic oligonucleotide"
gtggggcatcctttgaagcct

SEQ ID NO: 27085 - DNA, 21 bp, Artificial Sequence
  source: /note="Description of Artificial Sequence: Synthetic oligonucleotide"
gttggtcattctttgatgcct

SEQ ID NO: 27086 - DNA, 21 bp, Artificial Sequence
  source: /note="Description of Artificial Sequence: Synthetic oligonucleotide"
gtggggcatagtatgcctcct

SEQ ID NO: 27087 - DNA, 21 bp, Artificial Sequence
  source: /note="Description of Artificial Sequence: Synthetic oligonucleotide"
gttggtcatagtgtgactctt

SEQ ID NO: 27088 - DNA, 21 bp, Artificial Sequence
  source: /note="Description of Artificial Sequence: Synthetic oligonucleotide"
gtgggtaaggatatgagtgtg

SEQ ID NO: 27089 - DNA, 21 bp, Artificial Sequence
  source: /note="Description of Artificial Sequence: Synthetic oligonucleotide"
gttggtaagggtgaggcttct

SEQ ID NO: 27090 - DNA, 21 bp, Artificial Sequence
  source: /note="Description of Artificial Sequence: Synthetic oligonucleotide"
gttggtaagctggttaattgt

SEQ ID NO: 27091 - DNA, 21 bp, Artificial Sequence
  source: /note="Description of Artificial Sequence: Synthetic oligonucleotide"
gtgggtttgcctccggcgccg

SEQ ID NO: 27092 - DNA, 21 bp, Artificial Sequence
  source: /note="Description of Artificial Sequence: Synthetic oligonucleotide"
gttgggcttcagcataatctt

SEQ ID NO: 27093 - DNA, 21 bp, Artificial Sequence
  source: /note="Description of Artificial Sequence: Synthetic oligonucleotide"
gttggtttgacttcgacggtg

SEQ ID NO: 27094 - DNA, 21 bp, Artificial Sequence
  source: /note="Description of Artificial Sequence: Synthetic oligonucleotide"
gttgggatgaggattccggcg

SEQ ID NO: 27095 - DNA, 21 bp, Artificial Sequence
  source: /note="Description of Artificial Sequence: Synthetic oligonucleotide"
gtgggtaataaggggattagt

SEQ ID NO: 27096 - DNA, 21 bp, Artificial Sequence
  source: /note="Description of Artificial Sequence: Synthetic oligonucleotide"
gttggtaatttgcaggctttt

SEQ ID NO: 27097 - DNA, 21 bp, Artificial Sequence
  source: /note="Description of Artificial Sequence: Synthetic oligonucleotide"
gtggggaatcgggcgtttatt

SEQ ID NO: 27098 - DNA, 21 bp, Artificial Sequence
  source: /note="Description of Artificial Sequence: Synthetic oligonucleotide"
gttggtaattctttgcatgct

SEQ ID NO: 27099 - DNA, 21 bp, Artificial Sequence
  source: /note="Description of Artificial Sequence: Synthetic oligonucleotide"
gttgggaattatgtgggtagg

SEQ ID NO: 27100 - DNA, 21 bp, Artificial Sequence
  source: /note="Description of Artificial Sequence: Synthetic oligonucleotide"
gtgggtcctactggttcggct

SEQ ID NO: 27101 - DNA, 21 bp, Artificial Sequence
  source: /note="Description of Artificial Sequence: Synthetic oligonucleotide"
gttggtcagaatgctgagtgg

SEQ ID NO: 27102 - DNA, 21 bp, Artificial Sequence
  source: /note="Description of Artificial Sequence: Synthetic oligonucleotide"
gttggtcgtctgacgatgcct

SEQ ID NO: 27103 - DNA, 21 bp, Artificial Sequence
  source: /note="Description of Artificial Sequence: Synthetic oligonucleotide"
gtggggaggtcggtgcttgat

SEQ ID NO: 27104 - DNA, 21 bp, Artificial Sequence
  source: /note="Description of Artificial Sequence: Synthetic oligonucleotide"
gtgggttcgtttattccgact

SEQ ID NO: 27105 - DNA, 21 bp, Artificial Sequence
  source: /note="Description of Artificial Sequence: Synthetic oligonucleotide"
gttggtagtggtgcgcctgag

SEQ ID NO: 27106 - DNA, 21 bp, Artificial Sequence
  source: /note="Description of Artificial Sequence: Synthetic oligonucleotide"
gttgggtctggtcttgataat

SEQ ID NO: 27107 - DNA, 21 bp, Artificial Sequence
  source: /note="Description of Artificial Sequence: Synthetic oligonucleotide"
gtggggtcgattgatttgcct

SEQ ID NO: 27108 - DNA, 21 bp, Artificial Sequence
  source: /note="Description of Artificial Sequence: Synthetic oligonucleotide"
gttggttcgaaggctctgttg

SEQ ID NO: 27109 - DNA, 21 bp, Artificial Sequence
  source: /note="Description of Artificial Sequence: Synthetic oligonucleotide"
gttggttctctttggcttgat

SEQ ID NO: 27110 - DNA, 21 bp, Artificial Sequence
  source: /note="Description of Artificial Sequence: Synthetic oligonucleotide"
gtggggtcgccgaagcctacg

SEQ ID NO: 27111 - DNA, 21 bp, Artificial Sequence
  source: /note="Description of Artificial Sequence: Synthetic oligonucleotide"
gttgggagtcagtatctgccg

SEQ ID NO: 27112 - DNA, 21 bp, Artificial Sequence
  source: /note="Description of Artificial Sequence: Synthetic oligonucleotide"
gttgggtctcgtgctacgagt

SEQ ID NO: 27113 - DNA, 21 bp, Artificial Sequence
  source: /note="Description of Artificial Sequence: Synthetic oligonucleotide"
gttgggtcgtctaagggggct

SEQ ID NO: 27114 - DNA, 21 bp, Artificial Sequence
  source: /note="Description of Artificial Sequence: Synthetic oligonucleotide"
gtggggagttctgtggatgct

SEQ ID NO: 27115 - DNA, 21 bp, Artificial Sequence
  source: /note="Description of Artificial Sequence: Synthetic oligonucleotide"
gtgggttcgactgggaggact

SEQ ID NO: 27116 - DNA, 21 bp, Artificial Sequence
  source: /note="Description of Artificial Sequence: Synthetic oligonucleotide"
gttggtagtactcgtgagctt

SEQ ID NO: 27117 - DNA, 21 bp, Artificial Sequence
  source: /note="Description of Artificial Sequence: Synthetic oligonucleotide"
gttggttcttatattactgtt

SEQ ID NO: 27118 - DNA, 21 bp, Artificial Sequence
  source: /note="Description of Artificial Sequence: Synthetic oligonucleotide"
gttgggacggttactaggccg

SEQ ID NO: 27119 - DNA, 21 bp, Artificial Sequence
  source: /note="Description of Artificial Sequence: Synthetic oligonucleotide"
gttggtgtgacgatgccgtat

SEQ ID NO: 27120 - DNA, 21 bp, Artificial Sequence
  source: /note="Description of Artificial Sequence: Synthetic oligonucleotide"
gtggggtatgaggcgcatgcg

SEQ ID NO: 27121 - DNA, 21 bp, Artificial Sequence
  source: /note="Description of Artificial Sequence: Synthetic oligonucleotide"
gttggttatccggcgaatccg

SEQ ID NO: 27122 - DNA, 21 bp, Artificial Sequence
  source: /note="Description of Artificial Sequence: Synthetic oligonucleotide"
gttcatgcggagcttatgcgt

SEQ ID NO: 27123 - DNA, 21 bp, Artificial Sequence
  source: /note="Description of Artificial Sequence: Synthetic oligonucleotide"
gttcatgcttcgactgctgtg

SEQ ID NO: 27124 - DNA, 21 bp, Artificial Sequence
  source: /note="Description of Artificial Sequence: Synthetic oligonucleotide"
gtgcatgatggtgggcgtcat

SEQ ID NO: 27125 - DNA, 21 bp, Artificial Sequence
  source: /note="Description of Artificial Sequence: Synthetic oligonucleotide"
gttcatgatgggaagattcgt

SEQ ID NO: 27126 - DNA, 21 bp, Artificial Sequence
  source: /note="Description of Artificial Sequence: Synthetic oligonucleotide"
gttcatgagaatgggtcggtt

SEQ ID NO: 27127 - DNA, 21 bp, Artificial Sequence
  source: /note="Description of Artificial Sequence: Synthetic oligonucleotide"
gtgcatggggctgctcagacg

SEQ ID NO: 27128 - DNA, 21 bp, Artificial Sequence
  source: /note="Description of Artificial Sequence: Synthetic oligonucleotide"
gttcatggtcctatgcagcat

SEQ ID NO: 27129 - DNA, 21 bp, Artificial Sequence
  source: /note="Description of Artificial Sequence: Synthetic oligonucleotide"
gttcatggtacggatccggat

SEQ ID NO: 27130 - DNA, 21 bp, Artificial Sequence
  source: /note="Description of Artificial Sequence: Synthetic oligonucleotide"
gttcatcataatttgacgccg

SEQ ID NO: 27131 - DNA, 21 bp, Artificial Sequence
  source: /note="Description of Artificial Sequence: Synthetic oligonucleotide"
gtgcataagagtgctgattat

SEQ ID NO: 27132 - DNA, 21 bp, Artificial Sequence
  source: /note="Description of Artificial Sequence: Synthetic oligonucleotide"
gttcatcttcctagtatgccg

SEQ ID NO: 27133 - DNA, 21 bp, Artificial Sequence
  source: /note="Description of Artificial Sequence: Synthetic oligonucleotide"
gttcatctgcctactcttgct

SEQ ID NO: 27134 - DNA, 21 bp, Artificial Sequence
  source: /note="Description of Artificial Sequence: Synthetic oligonucleotide"
gttcataatggggggcgttct

SEQ ID NO: 27135 - DNA, 21 bp, Artificial Sequence
  source: /note="Description of Artificial Sequence: Synthetic oligonucleotide"
gtgcataatggtttgacgcct

SEQ ID NO: 27136 - DNA, 21 bp, Artificial Sequence
  source: /note="Description of Artificial Sequence: Synthetic oligonucleotide"
gttcataatatgctgaaggct

SEQ ID NO: 27137 - DNA, 21 bp, Artificial Sequence
  source: /note="Description of Artificial Sequence: Synthetic oligonucleotide"
gtgcatcctcattctgttaat

SEQ ID NO: 27138 - DNA, 21 bp, Artificial Sequence
  source: /note="Description of Artificial Sequence: Synthetic oligonucleotide"
gtgcatcctcgtatgctgacg

SEQ ID NO: 27139 - DNA, 21 bp, Artificial Sequence
  source: /note="Description of Artificial Sequence: Synthetic oligonucleotide"
gtgcatccgagttcggtgact

SEQ ID NO: 27140 - DNA, 21 bp, Artificial Sequence
  source: /note="Description of Artificial Sequence: Synthetic oligonucleotide"
gtgcatccggtgctggcgtcg

SEQ ID NO: 27141 - DNA, 21 bp, Artificial Sequence
  source: /note="Description of Artificial Sequence: Synthetic oligonucleotide"
gtgcatcaggctcgttttgcg

SEQ ID NO: 27142 - DNA, 21 bp, Artificial Sequence
  source: /note="Description of Artificial Sequence: Synthetic oligonucleotide"
gtgcatcaggagcggtcgtgg

SEQ ID NO: 27143 - DNA, 21 bp, Artificial Sequence
  source: /note="Description of Artificial Sequence: Synthetic oligonucleotide"
gttcatcgtcagctggaggat

SEQ ID NO: 27144 - DNA, 21 bp, Artificial Sequence
  source: /note="Description of Artificial Sequence: Synthetic oligonucleotide"
gttcataggacgcaggattct

SEQ ID NO: 27145 - DNA, 21 bp, Artificial Sequence
  source: /note="Description of Artificial Sequence: Synthetic oligonucleotide"
gtgcattcgtttaagttgggg

SEQ ID NO: 27146 - DNA, 21 bp, Artificial Sequence
  source: /note="Description of Artificial Sequence: Synthetic oligonucleotide"
gtgcatagtaattctccttct

SEQ ID NO: 27147 - DNA, 21 bp, Artificial Sequence
  source: /note="Description of Artificial Sequence: Synthetic oligonucleotide"
gttcattcgccgcagcagagt

SEQ ID NO: 27148 - DNA, 21 bp, Artificial Sequence
  source: /note="Description of Artificial Sequence: Synthetic oligonucleotide"
gtgcattcgagtattaatgct

SEQ ID NO: 27149 - DNA, 21 bp, Artificial Sequence
  source: /note="Description of Artificial Sequence: Synthetic oligonucleotide"
gtgcatactccgattgggact

SEQ ID NO: 27150 - DNA, 21 bp, Artificial Sequence
  source: /note="Description of Artificial Sequence: Synthetic oligonucleotide"
gtgcatacgtctacgatttct

SEQ ID NO: 27151 - DNA, 21 bp, Artificial Sequence
  source: /note="Description of Artificial Sequence: Synthetic oligonucleotide"
gtgcatacgactgggatgctg

SEQ ID NO: 27152 - DNA, 21 bp, Artificial Sequence
  source: /note="Description of Artificial Sequence: Synthetic oligonucleotide"
gtgcatgtttctacgatgccg

SEQ ID NO: 27153 - DNA, 21 bp, Artificial Sequence
  source: /note="Description of Artificial Sequence: Synthetic oligonucleotide"
gttcatgttactggtaatctg

SEQ ID NO: 27154 - DNA, 21 bp, Artificial Sequence
  source: /note="Description of Artificial Sequence: Synthetic oligonucleotide"
gtgattgcttctgatatttct

SEQ ID NO: 27155 - DNA, 21 bp, Artificial Sequence
  source: /note="Description of Artificial Sequence: Synthetic oligonucleotide"
gttattgcgacggataggctt

SEQ ID NO: 27156 - DNA, 21 bp, Artificial Sequence
  source: /note="Description of Artificial Sequence: Synthetic oligonucleotide"
gtgattgctgttgatcggatg

SEQ ID NO: 27157 - DNA, 21 bp, Artificial Sequence
  source: /note="Description of Artificial Sequence: Synthetic oligonucleotide"
gttattgattcggagcttgat

SEQ ID NO: 27158 - DNA, 21 bp, Artificial Sequence
  source: /note="Description of Artificial Sequence: Synthetic oligonucleotide"
gtgattgattcgcagaagaag

SEQ ID NO: 27159 - DNA, 21 bp, Artificial Sequence
  source: /note="Description of Artificial Sequence: Synthetic oligonucleotide"
gttattgaggctagtaggaat

SEQ ID NO: 27160 - DNA, 21 bp, Artificial Sequence
  source: /note="Description of Artificial Sequence: Synthetic oligonucleotide"
gttattggtaaggggactcat

SEQ ID NO: 27161 - DNA, 21 bp, Artificial Sequence
  source: /note="Description of Artificial Sequence: Synthetic oligonucleotide"
gttattcatactatgggggcg

SEQ ID NO: 27162 - DNA, 21 bp, Artificial Sequence
  source: /note="Description of Artificial Sequence: Synthetic oligonucleotide"
gtgattattgagacttctgct

SEQ ID NO: 27163 - DNA, 21 bp, Artificial Sequence
  source: /note="Description of Artificial Sequence: Synthetic oligonucleotide"
gtgattttggataaggctgtt

SEQ ID NO: 27164 - DNA, 21 bp, Artificial Sequence
  source: /note="Description of Artificial Sequence: Synthetic oligonucleotide"
gttattttgaagggtgctccg

SEQ ID NO: 27165 - DNA, 21 bp, Artificial Sequence
  source: /note="Description of Artificial Sequence: Synthetic oligonucleotide"
gttattcttacgtctgcggtg

SEQ ID NO: 27166 - DNA, 21 bp, Artificial Sequence
  source: /note="Description of Artificial Sequence: Synthetic oligonucleotide"
gttattaatggtcttgcgtct

SEQ ID NO: 27167 - DNA, 21 bp, Artificial Sequence
  source: /note="Description of Artificial Sequence: Synthetic oligonucleotide"
gttattaatgggttgggtgtg

SEQ ID NO: 27168 - DNA, 21 bp, Artificial Sequence
  source: /note="Description of Artificial Sequence: Synthetic oligonucleotide"
gttattaataatactggtaat

SEQ ID NO: 27169 - DNA, 21 bp, Artificial Sequence
  source: /note="Description of Artificial Sequence: Synthetic oligonucleotide"
gttattcctcctatgcgtagt

SEQ ID NO: 27170 - DNA, 21 bp, Artificial Sequence
  source: /note="Description of Artificial Sequence: Synthetic oligonucleotide"
gtgattcctccttgggatatt

SEQ ID NO: 27171 - DNA, 21 bp, Artificial Sequence
  source: /note="Description of Artificial Sequence: Synthetic oligonucleotide"
gtgattccgcggactttgcag

SEQ ID NO: 27172 - DNA, 21 bp, Artificial Sequence
  source: /note="Description of Artificial Sequence: Synthetic oligonucleotide"
gttattcagttgcgtggggcg

SEQ ID NO: 27173 - DNA, 21 bp, Artificial Sequence
  source: /note="Description of Artificial Sequence: Synthetic oligonucleotide"
gttattcggccgtcgacgcat

SEQ ID NO: 27174 - DNA, 21 bp, Artificial Sequence
  source: /note="Description of Artificial Sequence: Synthetic oligonucleotide"
gttattagtgggttgaatatg

SEQ ID NO: 27175 - DNA, 21 bp, Artificial Sequence
  source: /note="Description of Artificial Sequence: Synthetic oligonucleotide"
gtgatttctcataagactaat

SEQ ID NO: 27176 - DNA, 21 bp, Artificial Sequence
  source: /note="Description of Artificial Sequence: Synthetic oligonucleotide"
gttatttcgcttagtgagctg

SEQ ID NO: 27177 - DNA, 21 bp, Artificial Sequence
  source: /note="Description of Artificial Sequence: Synthetic oligonucleotide"
gttattagtaatacgcgtgat

SEQ ID NO: 27178 - DNA, 21 bp, Artificial Sequence
  source: /note="Description of Artificial Sequence: Synthetic oligonucleotide"
gttatttctcgtaaggggccg

SEQ ID NO: 27179 - DNA, 21 bp, Artificial Sequence
  source: /note="Description of Artificial Sequence: Synthetic oligonucleotide"
gtgatttcttctgcggatctt

SEQ ID NO: 27180 - DNA, 21 bp, Artificial Sequence
  source: /note="Description of Artificial Sequence: Synthetic oligonucleotide"
gttattagttcttttgcggag

SEQ ID NO: 27181 - DNA, 21 bp, Artificial Sequence
  source: /note="Description of Artificial Sequence: Synthetic oligonucleotide"
gttattagtactagtctgccg

SEQ ID NO: 27182 - DNA, 21 bp, Artificial Sequence
  source: /note="Description of Artificial Sequence: Synthetic oligonucleotide"
gtgatttctgtgccggcttcg

SEQ ID NO: 27183 - DNA, 21 bp, Artificial Sequence
  source: /note="Description of Artificial Sequence: Synthetic oligonucleotide"
gttattacggagaagtctgct

SEQ ID NO: 27184 - DNA, 21 bp, Artificial Sequence
  source: /note="Description of Artificial Sequence: Synthetic oligonucleotide"
gtgattacgaggtctggtact

SEQ ID NO: 27185 - DNA, 21 bp, Artificial Sequence
  source: /note="Description of Artificial Sequence: Synthetic oligonucleotide"
gttattacgagtttgggtccg

SEQ ID NO: 27186 - DNA, 21 bp, Artificial Sequence
  source: /note="Description of Artificial Sequence: Synthetic oligonucleotide"
gttattacttctacgggtgcg

SEQ ID NO: 27187 - DNA, 21 bp, Artificial Sequence
  source: /note="Description of Artificial Sequence: Synthetic oligonucleotide"
gtgattgttctgggtcctgtt

SEQ ID NO: 27188 - DNA, 21 bp, Artificial Sequence
  source: /note="Description of Artificial Sequence: Synthetic oligonucleotide"
gttattgttcctgatgtttgg

SEQ ID NO: 27189 - DNA, 21 bp, Artificial Sequence
  source: /note="Description of Artificial Sequence: Synthetic oligonucleotide"
gttaaggatgcttttgcgccg

SEQ ID NO: 27190 - DNA, 21 bp, Artificial Sequence
  source: /note="Description of Artificial Sequence: Synthetic oligonucleotide"
gttaaggatgatcataggtgt

SEQ ID NO: 27191 - DNA, 21 bp, Artificial Sequence
  source: /note="Description of Artificial Sequence: Synthetic oligonucleotide"
gttaaggatcttcctcaggcg

SEQ ID NO: 27192 - DNA, 21 bp, Artificial Sequence
  source: /note="Description of Artificial Sequence: Synthetic oligonucleotide"
gttaaggatcctcggatgtcg

SEQ ID NO: 27193 - DNA, 21 bp, Artificial Sequence
  source: /note="Description of Artificial Sequence: Synthetic oligonucleotide"
gtgaaggattcgactattggt

SEQ ID NO: 27194 - DNA, 21 bp, Artificial Sequence
  source: /note="Description of Artificial Sequence: Synthetic oligonucleotide"
gtgaagtttcagccgtctctt

SEQ ID NO: 27195 - DNA, 21 bp, Artificial Sequence
  source: /note="Description of Artificial Sequence: Synthetic oligonucleotide"
gttaaggggcagctttgttgt

SEQ ID NO: 27196 - DNA, 21 bp, Artificial Sequence
  source: /note="Description of Artificial Sequence: Synthetic oligonucleotide"
gttaagggttattcgaattat

SEQ ID NO: 27197 - DNA, 21 bp, Artificial Sequence
  source: /note="Description of Artificial Sequence: Synthetic oligonucleotide"
gtgaagcttgcgatggaggat

SEQ ID NO: 27198 - DNA, 21 bp, Artificial Sequence
  source: /note="Description of Artificial Sequence: Synthetic oligonucleotide"
gttaagcttggtattcaggcg

SEQ ID NO: 27199 - DNA, 21 bp, Artificial Sequence
  source: /note="Description of Artificial Sequence: Synthetic oligonucleotide"
gtgaagaatgcggttacgcct

SEQ ID NO: 27200 - DNA, 21 bp, Artificial Sequence
  source: /note="Description of Artificial Sequence: Synthetic oligonucleotide"
gtgaagaattgtatggtggag

SEQ ID NO: 27201 - DNA, 21 bp, Artificial Sequence
  source: /note="Description of Artificial Sequence: Synthetic oligonucleotide"
gttaagaatccgatttcgtat

SEQ ID NO: 27202 - DNA, 21 bp, Artificial Sequence
  source: /note="Description of Artificial Sequence: Synthetic oligonucleotide"
gtgaagaatactaatgtgtcg

SEQ ID NO: 27203 - DNA, 21 bp, Artificial Sequence
  source: /note="Description of Artificial Sequence: Synthetic oligonucleotide"
gtgaagaatacttatcctgag

SEQ ID NO: 27204 - DNA, 21 bp, Artificial Sequence
  source: /note="Description of Artificial Sequence: Synthetic oligonucleotide"
gtgaagaattatgagcctcag

SEQ ID NO: 27205 - DNA, 21 bp, Artificial Sequence
  source: /note="Description of Artificial Sequence: Synthetic oligonucleotide"
gttaagcctgatgcttgtttt

SEQ ID NO: 27206 - DNA, 21 bp, Artificial Sequence
  source: /note="Description of Artificial Sequence: Synthetic oligonucleotide"
gtgaagccggggatgatgcct

SEQ ID NO: 27207 - DNA, 21 bp, Artificial Sequence
  source: /note="Description of Artificial Sequence: Synthetic oligonucleotide"
gtgaagccgttggggatgcct

SEQ ID NO: 27208 - DNA, 21 bp, Artificial Sequence
  source: /note="Description of Artificial Sequence: Synthetic oligonucleotide"
gttaagccgatggcgagttcg

SEQ ID NO: 27209 - DNA, 21 bp, Artificial Sequence
  source: /note="Description of Artificial Sequence: Synthetic oligonucleotide"
gtgaagccgtcgccgattttg

SEQ ID NO: 27210 - DNA, 21 bp, Artificial Sequence
  source: /note="Description of Artificial Sequence: Synthetic oligonucleotide"
gtgaagcctactcctgatgcg

SEQ ID NO: 27211 - DNA, 21 bp, Artificial Sequence
  source: /note="Description of Artificial Sequence: Synthetic oligonucleotide"
gtgaagccttattcgcttcat

SEQ ID NO: 27212 - DNA, 21 bp, Artificial Sequence
  source: /note="Description of Artificial Sequence: Synthetic oligonucleotide"
gttaagccgtatgttacgatg

SEQ ID NO: 27213 - DNA, 21 bp, Artificial Sequence
  source: /note="Description of Artificial Sequence: Synthetic oligonucleotide"
gtgaagcagcgtgcgatggtt

SEQ ID NO: 27214 - DNA, 21 bp, Artificial Sequence
  source: /note="Description of Artificial Sequence: Synthetic oligonucleotide"
gtgaagtctgctgagacgatt

SEQ ID NO: 27215 - DNA, 21 bp, Artificial Sequence
  source: /note="Description of Artificial Sequence: Synthetic oligonucleotide"
gtgaagtcggatattcttgct

SEQ ID NO: 27216 - DNA, 21 bp, Artificial Sequence
  source: /note="Description of Artificial Sequence: Synthetic oligonucleotide"
gtgaagagtgagtttcctaag

SEQ ID NO: 27217 - DNA, 21 bp, Artificial Sequence
  source: /note="Description of Artificial Sequence: Synthetic oligonucleotide"
gtgaagtcggagactggggtg

SEQ ID NO: 27218 - DNA, 21 bp, Artificial Sequence
  source: /note="Description of Artificial Sequence: Synthetic oligonucleotide"
gttaagagtcgtgctgagact

SEQ ID NO: 27219 - DNA, 21 bp, Artificial Sequence
  source: /note="Description of Artificial Sequence: Synthetic oligonucleotide"
gtgaagtctagtgatagtact

SEQ ID NO: 27220 - DNA, 21 bp, Artificial Sequence
  source: /note="Description of Artificial Sequence: Synthetic oligonucleotide"
gtgaagactaatgcgacgctg

SEQ ID NO: 27221 - DNA, 21 bp, Artificial Sequence
  source: /note="Description of Artificial Sequence: Synthetic oligonucleotide"
gttaagactcctcctctgacg

SEQ ID NO: 27222 - DNA, 21 bp, Artificial Sequence
  source: /note="Description of Artificial Sequence: Synthetic oligonucleotide"
gttaagacgccttcgttgaat

SEQ ID NO: 27223 - DNA, 21 bp, Artificial Sequence
  source: /note="Description of Artificial Sequence: Synthetic oligonucleotide"
gtgaagactccttgggggcct

SEQ ID NO: 27224 - DNA, 21 bp, Artificial Sequence
  source: /note="Description of Artificial Sequence: Synthetic oligonucleotide"
gttaagacgcagtcggatctg

SEQ ID NO: 27225 - DNA, 21 bp, Artificial Sequence
  source: /note="Description of Artificial Sequence: Synthetic oligonucleotide"
gttaaggtgccgggtgctttt

SEQ ID NO: 27226 - DNA, 21 bp, Artificial Sequence
  source: /note="Description of Artificial Sequence: Synthetic oligonucleotide"
gttttggcgcatagtgatagt

SEQ ID NO: 27227 - DNA, 21 bp, Artificial Sequence
  source: /note="Description of Artificial Sequence: Synthetic oligonucleotide"
gttttggctcattcgacgtat

SEQ ID NO: 27228 - DNA, 21 bp, Artificial Sequence
  source: /note="Description of Artificial Sequence: Synthetic oligonucleotide"
gttttggcgccgttggtttct

SEQ ID NO: 27229 - DNA, 21 bp, Artificial Sequence
  source: /note="Description of Artificial Sequence: Synthetic oligonucleotide"
gttttggcgcggcagtatcct

SEQ ID NO: 27230 - DNA, 21 bp, Artificial Sequence
  source: /note="Description of Artificial Sequence: Synthetic oligonucleotide"
gtgttggcttctacggtttct

SEQ ID NO: 27231 - DNA, 21 bp, Artificial Sequence
  source: /note="Description of Artificial Sequence: Synthetic oligonucleotide"
gtgcttgctacgactgtgggt

SEQ ID NO: 27232 - DNA, 21 bp, Artificial Sequence
  source: /note="Description of Artificial Sequence: Synthetic oligonucleotide"
gtgcttgcgacggtgactaag

SEQ ID NO: 27233 - DNA, 21 bp, Artificial Sequence
  source: /note="Description of Artificial Sequence: Synthetic oligonucleotide"
gttttggcggttcgtacgaat

SEQ ID NO: 27234 - DNA, 21 bp, Artificial Sequence
  source: /note="Description of Artificial Sequence: Synthetic oligonucleotide"
gttcttgattgggagggggat

SEQ ID NO: 27235 - DNA, 21 bp, Artificial Sequence
  source: /note="Description of Artificial Sequence: Synthetic oligonucleotide"
gttcttgagcatcttcatccg

SEQ ID NO: 27236 - DNA, 21 bp, Artificial Sequence
  source: /note="Description of Artificial Sequence: Synthetic oligonucleotide"
gtgctggagaagttgaagact

SEQ ID NO: 27237 - DNA, 21 bp, Artificial Sequence
  source: /note="Description of Artificial Sequence: Synthetic oligonucleotide"
gttttggagcttgagcatcgg

SEQ ID NO: 27238 - DNA, 21 bp, Artificial Sequence
  source: /note="Description of Artificial Sequence: Synthetic oligonucleotide"
gtgcttgagcctctgtctaag

SEQ ID NO: 27239 - DNA, 21 bp, Artificial Sequence
  source: /note="Description of Artificial Sequence: Synthetic oligonucleotide"
gttttggagactcgtactctt

SEQ ID NO: 27240 - DNA, 21 bp, Artificial Sequence
  source: /note="Description of Artificial Sequence: Synthetic oligonucleotide"
gttcttggggggctggcttct

SEQ ID NO: 27241 - DNA, 21 bp, Artificial Sequence
  source: /note="Description of Artificial Sequence: Synthetic oligonucleotide"
gttcttggtctggcgcctgct

SEQ ID NO: 27242 - DNA, 21 bp, Artificial Sequence
  source: /note="Description of Artificial Sequence: Synthetic oligonucleotide"
gtgcttgggcttggggggcct

SEQ ID NO: 27243 - DNA, 21 bp, Artificial Sequence
  source: /note="Description of Artificial Sequence: Synthetic oligonucleotide"
gtgttggggatgggtgagtgg

SEQ ID NO: 27244 - DNA, 21 bp, Artificial Sequence
  source: /note="Description of Artificial Sequence: Synthetic oligonucleotide"
gttctgggtcgtggttattcg

SEQ ID NO: 27245 - DNA, 21 bp, Artificial Sequence
  source: /note="Description of Artificial Sequence: Synthetic oligonucleotide"
gtgctgggttcgctgcagcat

SEQ ID NO: 27246 - DNA, 21 bp, Artificial Sequence
  source: /note="Description of Artificial Sequence: Synthetic oligonucleotide"
gtgttggggtctgtgggttct

SEQ ID NO: 27247 - DNA, 21 bp, Artificial Sequence
  source: /note="Description of Artificial Sequence: Synthetic oligonucleotide"
gtgcttggttatagtaagcct

SEQ ID NO: 27248 - DNA, 21 bp, Artificial Sequence
  source: /note="Description of Artificial Sequence: Synthetic oligonucleotide"
gtgctgcatgctgcttcggct

SEQ ID NO: 27249 - DNA, 21 bp, Artificial Sequence
  source: /note="Description of Artificial Sequence: Synthetic oligonucleotide"
gttcttcatcagaggggtgct

SEQ ID NO: 27250 - DNA, 21 bp, Artificial Sequence
  source: /note="Description of Artificial Sequence: Synthetic oligonucleotide"
gtgttgaaggcgcatcctgat

SEQ ID NO: 27251 - DNA, 21 bp, Artificial Sequence
  source: /note="Description of Artificial Sequence: Synthetic oligonucleotide"
gttttgaagcctggggtgacg

SEQ ID NO: 27252 - DNA, 21 bp, Artificial Sequence
  source: /note="Description of Artificial Sequence: Synthetic oligonucleotide"
gttcttaagccttctgttccg

SEQ ID NO: 27253 - DNA, 21 bp, Artificial Sequence
  source: /note="Description of Artificial Sequence: Synthetic oligonucleotide"
gtgcttaagccttatattaat

SEQ ID NO: 27254 - DNA, 21 bp, Artificial Sequence
  source: /note="Description of Artificial Sequence: Synthetic oligonucleotide"
gtgcttaagtctcattctgcg

SEQ ID NO: 27255 - DNA, 21 bp, Artificial Sequence
  source: /note="Description of Artificial Sequence: Synthetic oligonucleotide"
gttctgaagtcttcggctagt

SEQ ID NO: 27256 - DNA, 21 bp, Artificial Sequence
  source: /note="Description of Artificial Sequence: Synthetic oligonucleotide"
gtgctgcttcctagtcatcct

SEQ ID NO: 27257 - DNA, 21 bp, Artificial Sequence
  source: /note="Description of Artificial Sequence: Synthetic oligonucleotide"
gttctgttgactaagacgtgt

SEQ ID NO: 27258 - DNA, 21 bp, Artificial Sequence
  source: /note="Description of Artificial Sequence: Synthetic oligonucleotide"
gtgttgatgccttctacgatt

SEQ ID NO: 27259 - DNA, 21 bp, Artificial Sequence
  source: /note="Description of Artificial Sequence: Synthetic oligonucleotide"
gttctgatgcctactgaggct

SEQ ID NO: 27260 - DNA, 21 bp, Artificial Sequence
  source: /note="Description of Artificial Sequence: Synthetic oligonucleotide"
gtgttgaatggtaggagttct

SEQ ID NO: 27261 - DNA, 21 bp, Artificial Sequence
  source: /note="Description of Artificial Sequence: Synthetic oligonucleotide"
gttctgaatcatcctactttt

SEQ ID NO: 27262 - DNA, 21 bp, Artificial Sequence
  source: /note="Description of Artificial Sequence: Synthetic oligonucleotide"
gtgttgaatcatcagtcgagt

SEQ ID NO: 27263 - DNA, 21 bp, Artificial Sequence
  source: /note="Description of Artificial Sequence: Synthetic oligonucleotide"
gttcttaatttgacgcagggg

SEQ ID NO: 27264 - DNA, 21 bp, Artificial Sequence
  source: /note="Description of Artificial Sequence: Synthetic oligonucleotide"
gttcttaatccgcttaattct

SEQ ID NO: 27265 - DNA, 21 bp, Artificial Sequence
  source: /note="Description of Artificial Sequence: Synthetic oligonucleotide"
gtgcttaatactgatgttact

SEQ ID NO: 27266 - DNA, 21 bp, Artificial Sequence
  source: /note="Description of Artificial Sequence: Synthetic oligonucleotide"
gtgctgaatactggggttggg

SEQ ID NO: 27267 - DNA, 21 bp, Artificial Sequence
  source: /note="Description of Artificial Sequence: Synthetic oligonucleotide"
gtgttgcctaagacttcggct

SEQ ID NO: 27268 - DNA, 21 bp, Artificial Sequence
  source: /note="Description of Artificial Sequence: Synthetic oligonucleotide"
gttctgccgaattctaagaat

SEQ ID NO: 27269 - DNA, 21 bp, Artificial Sequence
  source: /note="Description of Artificial Sequence: Synthetic oligonucleotide"
gttctgcctccgcttgcggcg

SEQ ID NO: 27270 - DNA, 21 bp, Artificial Sequence
  source: /note="Description of Artificial Sequence: Synthetic oligonucleotide"
gtgttgccgcctaataataag

SEQ ID NO: 27271 - DNA, 21 bp, Artificial Sequence
  source: /note="Description of Artificial Sequence: Synthetic oligonucleotide"
gttcttcctgttcctagggct

SEQ ID NO: 27272 - DNA, 21 bp, Artificial Sequence
  source: /note="Description of Artificial Sequence: Synthetic oligonucleotide"
gtgctgcagggttcttctgct

SEQ ID NO: 27273 - DNA, 21 bp, Artificial Sequence
  source: /note="Description of Artificial Sequence: Synthetic oligonucleotide"
gttttgcagacgactaggccg

SEQ ID NO: 27274 - DNA, 21 bp, Artificial Sequence
  source: /note="Description of Artificial Sequence: Synthetic oligonucleotide"
gttttgcgtggtcatttggct

SEQ ID NO: 27275 - DNA, 21 bp, Artificial Sequence
  source: /note="Description of Artificial Sequence: Synthetic oligonucleotide"
gttcttcgtcttgggactgct

SEQ ID NO: 27276 - DNA, 21 bp, Artificial Sequence
  source: /note="Description of Artificial Sequence: Synthetic oligonucleotide"
gtgcttcgtaatggtgcggag

SEQ ID NO: 27277 - DNA, 21 bp, Artificial Sequence
  source: /note="Description of Artificial Sequence: Synthetic oligonucleotide"
gttcttaggcagagtgtgcct

SEQ ID NO: 27278 - DNA, 21 bp, Artificial Sequence
  source: /note="Description of Artificial Sequence: Synthetic oligonucleotide"
gttctgcgttcggatgcggct

SEQ ID NO: 27279 - DNA, 21 bp, Artificial Sequence
  source: /note="Description of Artificial Sequence: Synthetic oligonucleotide"
gttttgcgtactggtgagttt

SEQ ID NO: 27280 - DNA, 21 bp, Artificial Sequence
  source: /note="Description of Artificial Sequence: Synthetic oligonucleotide"
gtgttgcggactagttctggt

SEQ ID NO: 27281 - DNA, 21 bp, Artificial Sequence
  source: /note="Description of Artificial Sequence: Synthetic oligonucleotide"
gtgctttctcatgatgttgtt

SEQ ID NO: 27282 - DNA, 21 bp, Artificial Sequence
  source: /note="Description of Artificial Sequence: Synthetic oligonucleotide"
gttttgtctcatgggggtgct

SEQ ID NO: 27283 - DNA, 21 bp, Artificial Sequence
  source: /note="Description of Artificial Sequence: Synthetic oligonucleotide"
gttttgtcgccgaatacggct

SEQ ID NO: 27284 - DNA, 21 bp, Artificial Sequence
  source: /note="Description of Artificial Sequence: Synthetic oligonucleotide"
gttttgagtccgactggtatg

SEQ ID NO: 27285 - DNA, 21 bp, Artificial Sequence
  source: /note="Description of Artificial Sequence: Synthetic oligonucleotide"
gtgcttagtagggggaatacg

SEQ ID NO: 27286 - DNA, 21 bp, Artificial Sequence
  source: /note="Description of Artificial Sequence: Synthetic oligonucleotide"
gttttgagttctaattcgtat

SEQ ID NO: 27287 - DNA, 21 bp, Artificial Sequence
  source: /note="Description of Artificial Sequence: Synthetic oligonucleotide"
gttctttcgacgattagttcg

SEQ ID NO: 27288 - DNA, 21 bp, Artificial Sequence
  source: /note="Description of Artificial Sequence: Synthetic oligonucleotide"
gtgctgtcgactatgagtcct

SEQ ID NO: 27289 - DNA, 21 bp, Artificial Sequence
  source: /note="Description of Artificial Sequence: Synthetic oligonucleotide"
gttctttcggtttcgggtcgt

SEQ ID NO: 27290 - DNA, 21 bp, Artificial Sequence
  source: /note="Description of Artificial Sequence: Synthetic oligonucleotide"
gtgttgtcgtatcatactggg

SEQ ID NO: 27291 - DNA, 21 bp, Artificial Sequence
  source: /note="Description of Artificial Sequence: Synthetic oligonucleotide"
gttcttactgctacgatgagt

SEQ ID NO: 27292 - DNA, 21 bp, Artificial Sequence
  source: /note="Description of Artificial Sequence: Synthetic oligonucleotide"
gttcttacgggtcagcggctg

SEQ ID NO: 27293 - DNA, 21 bp, Artificial Sequence
  source: /note="Description of Artificial Sequence: Synthetic oligonucleotide"
gttctgactcagcagcctgtt

SEQ ID NO: 27294 - DNA, 21 bp, Artificial Sequence
  source: /note="Description of Artificial Sequence: Synthetic oligonucleotide"
gtgttgacgcgtgcggggatt

SEQ ID NO: 27295 - DNA, 21 bp, Artificial Sequence
  source: /note="Description of Artificial Sequence: Synthetic oligonucleotide"
gttttgacgagtaatactccg

SEQ ID NO: 27296 - DNA, 21 bp, Artificial Sequence
  source: /note="Description of Artificial Sequence: Synthetic oligonucleotide"
gttttggtggcggctagtatg

SEQ ID NO: 27297 - DNA, 21 bp, Artificial Sequence
  source: /note="Description of Artificial Sequence: Synthetic oligonucleotide"
gtgttggttaggagtggtagt

SEQ ID NO: 27298 - DNA, 21 bp, Artificial Sequence
  source: /note="Description of Artificial Sequence: Synthetic oligonucleotide"
gttttggtggtgcctaatcat

SEQ ID NO: 27299 - DNA, 21 bp, Artificial Sequence
  source: /note="Description of Artificial Sequence: Synthetic oligonucleotide"
gttttggtggtgagggggacg

SEQ ID NO: 27300 - DNA, 21 bp, Artificial Sequence
  source: /note="Description of Artificial Sequence: Synthetic oligonucleotide"
gttctgtattctggtttgtct

SEQ ID NO: 27301 - DNA, 21 bp, Artificial Sequence
  source: /note="Description of Artificial Sequence: Synthetic oligonucleotide"
gttttgtatactaatttggag

SEQ ID NO: 27302 - DNA, 21 bp, Artificial Sequence
  source: /note="Description of Artificial Sequence: Synthetic oligonucleotide"
gtgatggatgggctggagccg

SEQ ID NO: 27303 - DNA, 21 bp, Artificial Sequence
  source: /note="Description of Artificial Sequence: Synthetic oligonucleotide"
gtgatggatggggttcgtccg

SEQ ID NO: 27304 - DNA, 21 bp, Artificial Sequence
  source: /note="Description of Artificial Sequence: Synthetic oligonucleotide"
gtgatgggtgctaagggtttg

SEQ ID NO: 27305 - DNA, 21 bp, Artificial Sequence
  source: /note="Description of Artificial Sequence: Synthetic oligonucleotide"
gttatggggggtaatcctagt

SEQ ID NO: 27306 - DNA, 21 bp, Artificial Sequence
  source: /note="Description of Artificial Sequence: Synthetic oligonucleotide"
gttatgcatctggctgatgat

SEQ ID NO: 27307 - DNA, 21 bp, Artificial Sequence
  source: /note="Description of Artificial Sequence: Synthetic oligonucleotide"
gttatgaatctgttgaagcat

SEQ ID NO: 27308 - DNA, 21 bp, Artificial Sequence
  source: /note="Description of Artificial Sequence: Synthetic oligonucleotide"
gttatgaatctttctactatg

SEQ ID NO: 27309 - DNA, 21 bp, Artificial Sequence
  source: /note="Description of Artificial Sequence: Synthetic oligonucleotide"
gttatgaatagtcctcgttcg

SEQ ID NO: 27310 - DNA, 21 bp, Artificial Sequence
  source: /note="Description of Artificial Sequence: Synthetic oligonucleotide"
gttatgccttttacgcatgat

SEQ ID NO: 27311 - DNA, 21 bp, Artificial Sequence
  source: /note="Description of Artificial Sequence: Synthetic oligonucleotide"
gtgatgccgaatactccttct

SEQ ID NO: 27312 - DNA, 21 bp, Artificial Sequence
  source: /note="Description of Artificial Sequence: Synthetic oligonucleotide"
gttatgccgcagcggttgtcg

SEQ ID NO: 27313 - DNA, 21 bp, Artificial Sequence
  source: /note="Description of Artificial Sequence: Synthetic oligonucleotide"
gttatgccttctgcttctgcg

SEQ ID NO: 27314 - DNA, 21 bp, Artificial Sequence
  source: /note="Description of Artificial Sequence: Synthetic oligonucleotide"
gttatgcctagtctggtgagt

SEQ ID NO: 27315 - DNA, 21 bp, Artificial Sequence
  source: /note="Description of Artificial Sequence: Synthetic oligonucleotide"
gtgatgcaggcgtcgaatagt

SEQ ID NO: 27316 - DNA, 21 bp, Artificial Sequence
  source: /note="Description of Artificial Sequence: Synthetic oligonucleotide"
gtgatgcaggagaattgtccg

SEQ ID NO: 27317 - DNA, 21 bp, Artificial Sequence
  source: /note="Description of Artificial Sequence: Synthetic oligonucleotide"
gtgatgcagcttggtgagagt

SEQ ID NO: 27318 - DNA, 21 bp, Artificial Sequence
  source: /note="Description of Artificial Sequence: Synthetic oligonucleotide"
gtgatgcagtcgattttggct

SEQ ID NO: 27319 - DNA, 21 bp, Artificial Sequence
  source: /note="Description of Artificial Sequence: Synthetic oligonucleotide"
gtgatgcggctggataagcag

SEQ ID NO: 27320 - DNA, 21 bp, Artificial Sequence
  source: /note="Description of Artificial Sequence: Synthetic oligonucleotide"
gttatgcggcctgataggtcg

SEQ ID NO: 27321 - DNA, 21 bp, Artificial Sequence
  source: /note="Description of Artificial Sequence: Synthetic oligonucleotide"
gtgatgagtgcggttgatttg

SEQ ID NO: 27322 - DNA, 21 bp, Artificial Sequence
  source: /note="Description of Artificial Sequence: Synthetic oligonucleotide"
gttatgtctgattcgaaggtg

SEQ ID NO: 27323 - DNA, 21 bp, Artificial Sequence
  source: /note="Description of Artificial Sequence: Synthetic oligonucleotide"
gttatgagtatgcctcgtttg

SEQ ID NO: 27324 - DNA, 21 bp, Artificial Sequence
  source: /note="Description of Artificial Sequence: Synthetic oligonucleotide"
gtgatgtctccggattctatg

SEQ ID NO: 27325 - DNA, 21 bp, Artificial Sequence
  source: /note="Description of Artificial Sequence: Synthetic oligonucleotide"
gttatgagtagtaggactacg

SEQ ID NO: 27326 - DNA, 21 bp, Artificial Sequence
  source: /note="Description of Artificial Sequence: Synthetic oligonucleotide"
gtgatgacggatgcgctgcat

SEQ ID NO: 27327 - DNA, 21 bp, Artificial Sequence
  source: /note="Description of Artificial Sequence: Synthetic oligonucleotide"
gtgatgactagtcatcctatg

SEQ ID NO: 27328 - DNA, 21 bp, Artificial Sequence
  source: /note="Description of Artificial Sequence: Synthetic oligonucleotide"
gttatgacgagtcaggctatg

SEQ ID NO: 27329 - DNA, 21 bp, Artificial Sequence
  source: /note="Description of Artificial Sequence: Synthetic oligonucleotide"
gttatgactacgactggtcat

SEQ ID NO: 27330 - DNA, 21 bp, Artificial Sequence
  source: /note="Description of Artificial Sequence: Synthetic oligonucleotide"
gtgatgactgtggcttctctg

SEQ ID NO: 27331 - DNA, 21 bp, Artificial Sequence
  source: /note="Description of Artificial Sequence: Synthetic oligonucleotide"
gttatggttgagtctgggccg

SEQ ID NO: 27332 - DNA, 21 bp, Artificial Sequence
  source: /note="Description of Artificial Sequence: Synthetic oligonucleotide"
gttaatgcgaagtcgtcgact

SEQ ID NO: 27333 - DNA, 21 bp, Artificial Sequence
  source: /note="Description of Artificial Sequence: Synthetic oligonucleotide"
gtgaatgcgttgtctagtgct

SEQ ID NO: 27334 - DNA, 21 bp, Artificial Sequence
  source: /note="Description of Artificial Sequence: Synthetic oligonucleotide"
gttaatgcggttggggcgcct

SEQ ID NO: 27335 - DNA, 21 bp, Artificial Sequence
  source: /note="Description of Artificial Sequence: Synthetic oligonucleotide"
gttaatgatgtgttgcctact

SEQ ID NO: 27336 - DNA, 21 bp, Artificial Sequence
  source: /note="Description of Artificial Sequence: Synthetic oligonucleotide"
gttaatgattatgcgcatagt

SEQ ID NO: 27337 - DNA, 21 bp, Artificial Sequence
  source: /note="Description of Artificial Sequence: Synthetic oligonucleotide"
gtgaatgagctgggtaggacg

SEQ ID NO: 27338 - DNA, 21 bp, Artificial Sequence
  source: /note="Description of Artificial Sequence: Synthetic oligonucleotide"
gtgaatgagttggttcggact

SEQ ID NO: 27339 - DNA, 21 bp, Artificial Sequence
  source: /note="Description of Artificial Sequence: Synthetic oligonucleotide"
gttaattttaatccgatttcg

SEQ ID NO: 27340 - DNA, 21 bp, Artificial Sequence
  source: /note="Description of Artificial Sequence: Synthetic oligonucleotide"
gttaatgggcatgcgctgact

SEQ ID NO: 27341 - DNA, 21 bp, Artificial Sequence
  source: /note="Description of Artificial Sequence: Synthetic oligonucleotide"
gttaatgggcttaatgttgtt

SEQ ID NO: 27342 - DNA, 21 bp, Artificial Sequence
  source: /note="Description of Artificial Sequence: Synthetic oligonucleotide"
gtgaatgggaatgagcatggt

SEQ ID NO: 27343 - DNA, 21 bp, Artificial Sequence
  source: /note="Description of Artificial Sequence: Synthetic oligonucleotide"
gttaatgggtctgctttttcg

SEQ ID NO: 27344 - DNA, 21 bp, Artificial Sequence
  source: /note="Description of Artificial Sequence: Synthetic oligonucleotide"
gtgaatcatatgtcgtctcct

SEQ ID NO: 27345 - DNA, 21 bp, Artificial Sequence
  source: /note="Description of Artificial Sequence: Synthetic oligonucleotide"
gtgaatcataggtctgctccg

SEQ ID NO: 27346 - DNA, 21 bp, Artificial Sequence
  source: /note="Description of Artificial Sequence: Synthetic oligonucleotide"
gtgaataaggatcctttggcg

SEQ ID NO: 27347 - DNA, 21 bp, Artificial Sequence
  source: /note="Description of Artificial Sequence: Synthetic oligonucleotide"
gttaataagggtgtgtctgct

SEQ ID NO: 27348 - DNA, 21 bp, Artificial Sequence
  source: /note="Description of Artificial Sequence: Synthetic oligonucleotide"
gttaataagtctggttatcct

SEQ ID NO: 27349 - DNA, 21 bp, Artificial Sequence
  source: /note="Description of Artificial Sequence: Synthetic oligonucleotide"
gtgaataagtctacggtgtct

SEQ ID NO: 27350 - DNA, 21 bp, Artificial Sequence
  source: /note="Description of Artificial Sequence: Synthetic oligonucleotide"
gttaataagagttattcgatg

SEQ ID NO: 27351 - DNA, 21 bp, Artificial Sequence
  source: /note="Description of Artificial Sequence: Synthetic oligonucleotide"
gttaatttggcgtctagtgtg

SEQ ID NO: 27352 - DNA, 21 bp, Artificial Sequence
  source: /note="Description of Artificial Sequence: Synthetic oligonucleotide"
gttaatcttgggtctaataat

SEQ ID NO: 27353 - DNA, 21 bp, Artificial Sequence
  source: /note="Description of Artificial Sequence: Synthetic oligonucleotide"
gttaatttgcggctgggttcg

SEQ ID NO: 27354 - DNA, 21 bp, Artificial Sequence
  source: /note="Description of Artificial Sequence: Synthetic oligonucleotide"
gttaatctgtcgagtgtttgt

SEQ ID NO: 27355 - DNA, 21 bp, Artificial Sequence
  source: /note="Description of Artificial Sequence: Synthetic oligonucleotide"
gtgaatctggtgcatggtgtt

SEQ ID NO: 27356 - DNA, 21 bp, Artificial Sequence
  source: /note="Description of Artificial Sequence: Synthetic oligonucleotide"
gttaatctgtatcttacggag

SEQ ID NO: 27357 - DNA, 21 bp, Artificial Sequence
  source: /note="Description of Artificial Sequence: Synthetic oligonucleotide"
gtgaataatactaggaatgtt

SEQ ID NO: 27358 - DNA, 21 bp, Artificial Sequence
  source: /note="Description of Artificial Sequence: Synthetic oligonucleotide"
gttaatcctccgaatgttggt

SEQ ID NO: 27359 - DNA, 21 bp, Artificial Sequence
  source: /note="Description of Artificial Sequence: Synthetic oligonucleotide"
gttaatccgccttcgcgtccg

SEQ ID NO: 27360 - DNA, 21 bp, Artificial Sequence
  source: /note="Description of Artificial Sequence: Synthetic oligonucleotide"
gttaatcctcctacgcatgtt

SEQ ID NO: 27361 - DNA, 21 bp, Artificial Sequence
  source: /note="Description of Artificial Sequence: Synthetic oligonucleotide"
gttaatccgcgtgtggttcag

SEQ ID NO: 27362 - DNA, 21 bp, Artificial Sequence
  source: /note="Description of Artificial Sequence: Synthetic oligonucleotide"
gttaatccttcggcttcgtct

SEQ ID NO: 27363 - DNA, 21 bp, Artificial Sequence
  source: /note="Description of Artificial Sequence: Synthetic oligonucleotide"
gttaatcctagtagtccttcg

SEQ ID NO: 27364 - DNA, 21 bp, Artificial Sequence
  source: /note="Description of Artificial Sequence: Synthetic oligonucleotide"
gtgaatcggtctgttagtccg

SEQ ID NO: 27365 - DNA, 21 bp, Artificial Sequence
  source: /note="Description of Artificial Sequence: Synthetic oligonucleotide"
gtgaatcgtacgacgttgtat

SEQ ID NO: 27366 - DNA, 21 bp, Artificial Sequence
  source: /note="Description of Artificial Sequence: Synthetic oligonucleotide"
gtgaatagtgcgtctaagtcg

SEQ ID NO: 27367 - DNA, 21 bp, Artificial Sequence
  source: /note="Description of Artificial Sequence: Synthetic oligonucleotide"
gttaattcttttgagcgttct

SEQ ID NO: 27368 - DNA, 21 bp, Artificial Sequence
  source: /note="Description of Artificial Sequence: Synthetic oligonucleotide"
gtgaattcgggggcgactact

SEQ ID NO: 27369 - DNA, 21 bp, Artificial Sequence
  source: /note="Description of Artificial Sequence: Synthetic oligonucleotide"
gttaattcgatggagaggccg

SEQ ID NO: 27370 - DNA, 21 bp, Artificial Sequence
  source: /note="Description of Artificial Sequence: Synthetic oligonucleotide"
gtgaattctaggctgattgct

SEQ ID NO: 27371 - DNA, 21 bp, Artificial Sequence
  source: /note="Description of Artificial Sequence: Synthetic oligonucleotide"
gtgaattcttctctgcatggt

SEQ ID NO: 27372 - DNA, 21 bp, Artificial Sequence
  source: /note="Description of Artificial Sequence: Synthetic oligonucleotide"
gtgaattcgtcgaatagtcgg

SEQ ID NO: 27373 - DNA, 21 bp, Artificial Sequence
  source: /note="Description of Artificial Sequence: Synthetic oligonucleotide"
gttaattcgagtgtttgggct

SEQ ID NO: 27374 - DNA, 21 bp, Artificial Sequence
  source: /note="Description of Artificial Sequence: Synthetic oligonucleotide"
gtgaatagtactgcgtttcat

SEQ ID NO: 27375 - DNA, 21 bp, Artificial Sequence
  source: /note="Description of Artificial Sequence: Synthetic oligonucleotide"
gtgaatacgaaggttgggccg

SEQ ID NO: 27376 - DNA, 21 bp, Artificial Sequence
  source: /note="Description of Artificial Sequence: Synthetic oligonucleotide"
gtgaatactctgactggtgat

SEQ ID NO: 27377 - DNA, 21 bp, Artificial Sequence
  source: /note="Description of Artificial Sequence: Synthetic oligonucleotide"
gtgaatactaatcttgcgagt

SEQ ID NO: 27378 - DNA, 21 bp, Artificial Sequence
  source: /note="Description of Artificial Sequence: Synthetic oligonucleotide"
gttaatacttctggttggcag

SEQ ID NO: 27379 - DNA, 21 bp, Artificial Sequence
  source: /note="Description of Artificial Sequence: Synthetic oligonucleotide"
gttaatacggttccttatggt

SEQ ID NO: 27380 - DNA, 21 bp, Artificial Sequence
  source: /note="Description of Artificial Sequence: Synthetic oligonucleotide"
gtgaatactgtgacgtcgtcg

SEQ ID NO: 27381 - DNA, 21 bp, Artificial Sequence
  source: /note="Description of Artificial Sequence: Synthetic oligonucleotide"
gtgaatgttggtactctttat

SEQ ID NO: 27382 - DNA, 21 bp, Artificial Sequence
  source: /note="Description of Artificial Sequence: Synthetic oligonucleotide"
gttaatgtgaagagggaggtt

SEQ ID NO: 27383 - DNA, 21 bp, Artificial Sequence
  source: /note="Description of Artificial Sequence: Synthetic oligonucleotide"
gtgaatgttagggagactacg

SEQ ID NO: 27384 - DNA, 21 bp, Artificial Sequence
  source: /note="Description of Artificial Sequence: Synthetic oligonucleotide"
gtgaatgtgtctcattattcg

SEQ ID NO: 27385 - DNA, 21 bp, Artificial Sequence
  source: /note="Description of Artificial Sequence: Synthetic oligonucleotide"
gttaatgtttctcagactggg

SEQ ID NO: 27386 - DNA, 21 bp, Artificial Sequence
  source: /note="Description of Artificial Sequence: Synthetic oligonucleotide"
gttaattatgctccggctgtg

SEQ ID NO: 27387 - DNA, 21 bp, Artificial Sequence
  source: /note="Description of Artificial Sequence: Synthetic oligonucleotide"
gtgaattatcctgagtcgacg

SEQ ID NO: 27388 - DNA, 21 bp, Artificial Sequence
  source: /note="Description of Artificial Sequence: Synthetic oligonucleotide"
gttcctgcgatgactcagggt

SEQ ID NO: 27389 - DNA, 21 bp, Artificial Sequence
  source: /note="Description of Artificial Sequence: Synthetic oligonucleotide"
gttccggctcctggttataat

SEQ ID NO: 27390 - DNA, 21 bp, Artificial Sequence
  source: /note="Description of Artificial Sequence: Synthetic oligonucleotide"
gttcctgcgcagtcgcgtgag

SEQ ID NO: 27391 - DNA, 21 bp, Artificial Sequence
  source: /note="Description of Artificial Sequence: Synthetic oligonucleotide"
gttcctgcgaggtctcctggt

SEQ ID NO: 27392 - DNA, 21 bp, Artificial Sequence
  source: /note="Description of Artificial Sequence: Synthetic oligonucleotide"
gttcctgcgtcgtcgactagt

SEQ ID NO: 27393 - DNA, 21 bp, Artificial Sequence
  source: /note="Description of Artificial Sequence: Synthetic oligonucleotide"
gtgcctgctacggattttcgg

SEQ ID NO: 27394 - DNA, 21 bp, Artificial Sequence
  source: /note="Description of Artificial Sequence: Synthetic oligonucleotide"
gttccggcggtgacgtcgcgt

SEQ ID NO: 27395 - DNA, 21 bp, Artificial Sequence
  source: /note="Description of Artificial Sequence: Synthetic oligonucleotide"
gtgccgtgtccttcgcatact

SEQ ID NO: 27396 - DNA, 21 bp, Artificial Sequence
  source: /note="Description of Artificial Sequence: Synthetic oligonucleotide"
gttccggatgcgagtgatttt

SEQ ID NO: 27397 - DNA, 21 bp, Artificial Sequence
  source: /note="Description of Artificial Sequence: Synthetic oligonucleotide"
gttccggattcttgggatcgg

SEQ ID NO: 27398 - DNA, 21 bp, Artificial Sequence
  source: /note="Description of Artificial Sequence: Synthetic oligonucleotide"
gttccggagcgtgcgactatt

SEQ ID NO: 27399 - DNA, 21 bp, Artificial Sequence
  source: /note="Description of Artificial Sequence: Synthetic oligonucleotide"
gttccggagtatattattacg

SEQ ID NO: 27400 - DNA, 21 bp, Artificial Sequence
  source: /note="Description of Artificial Sequence: Synthetic oligonucleotide"
gttccgtttgcgagtatgacg

SEQ ID NO: 27401 - DNA, 21 bp, Artificial Sequence
  source: /note="Description of Artificial Sequence: Synthetic oligonucleotide"
gttccttttcagtttgagggg

SEQ ID NO: 27402 - DNA, 21 bp, Artificial Sequence
  source: /note="Description of Artificial Sequence: Synthetic oligonucleotide"
gttccgggggcgaatcggatt

SEQ ID NO: 27403 - DNA, 21 bp, Artificial Sequence
  source: /note="Description of Artificial Sequence: Synthetic oligonucleotide"
gtgccgggtgatctgagggtt

SEQ ID NO: 27404 - DNA, 21 bp, Artificial Sequence
  source: /note="Description of Artificial Sequence: Synthetic oligonucleotide"
gttcctggtaagccgggtgat

SEQ ID NO: 27405 - DNA, 21 bp, Artificial Sequence
  source: /note="Description of Artificial Sequence: Synthetic oligonucleotide"
gttccgggtatgacgactttg

SEQ ID NO: 27406 - DNA, 21 bp, Artificial Sequence
  source: /note="Description of Artificial Sequence: Synthetic oligonucleotide"
gtgcctgggaatccggcgact

SEQ ID NO: 27407 - DNA, 21 bp, Artificial Sequence
  source: /note="Description of Artificial Sequence: Synthetic oligonucleotide"
gttccggggcctgtggtggcg

SEQ ID NO: 27408 - DNA, 21 bp, Artificial Sequence
  source: /note="Description of Artificial Sequence: Synthetic oligonucleotide"
gttccgggtcggacgacgccg

SEQ ID NO: 27409 - DNA, 21 bp, Artificial Sequence
  source: /note="Description of Artificial Sequence: Synthetic oligonucleotide"
gtgcctggttctcggagtact

SEQ ID NO: 27410 - DNA, 21 bp, Artificial Sequence
  source: /note="Description of Artificial Sequence: Synthetic oligonucleotide"
gtgcctggttcgagtcggttg

SEQ ID NO: 27411 - DNA, 21 bp, Artificial Sequence
  source: /note="Description of Artificial Sequence: Synthetic oligonucleotide"
gtgccggggtcgtcttctcat

SEQ ID NO: 27412 - DNA, 21 bp, Artificial Sequence
  source: /note="Description of Artificial Sequence: Synthetic oligonucleotide"
gtgccgcatgagaagactccg

SEQ ID NO: 27413 - DNA, 21 bp, Artificial Sequence
  source: /note="Description of Artificial Sequence: Synthetic oligonucleotide"
gttccgcatattgtttctacg

SEQ ID NO: 27414 - DNA, 21 bp, Artificial Sequence
  source: /note="Description of Artificial Sequence: Synthetic oligonucleotide"
gtgccgcatttgacgtcgacg

SEQ ID NO: 27415 - DNA, 21 bp, Artificial Sequence
  source: /note="Description of Artificial Sequence: Synthetic oligonucleotide"
gttcctcatctgacggtggtt

SEQ ID NO: 27416 - DNA, 21 bp, Artificial Sequence
  source: /note="Description of Artificial Sequence: Synthetic oligonucleotide"
gttccgcattattcttcgagt

SEQ ID NO: 27417 - DNA, 21 bp, Artificial Sequence
  source: /note="Description of Artificial Sequence: Synthetic oligonucleotide"
gtgcctattattagtgatcag

SEQ ID NO: 27418 - DNA, 21 bp, Artificial Sequence
  source: /note="Description of Artificial Sequence: Synthetic oligonucleotide"
gttcctaagtttcctctggag

SEQ ID NO: 27419 - DNA, 21 bp, Artificial Sequence
  source: /note="Description of Artificial Sequence: Synthetic oligonucleotide"
gtgcctaagttgtcgtatccg

SEQ ID NO: 27420 - DNA, 21 bp, Artificial Sequence
  source: /note="Description of Artificial Sequence: Synthetic oligonucleotide"
gttccgaagaatgagatgggt

SEQ ID NO: 27421 - DNA, 21 bp, Artificial Sequence
  source: /note="Description of Artificial Sequence: Synthetic oligonucleotide"
gttccgaagcagtctatgcag

SEQ ID NO: 27422 - DNA, 21 bp, Artificial Sequence
  source: /note="Description of Artificial Sequence: Synthetic oligonucleotide"
gtgccgaagcagtctgtgaat

SEQ ID NO: 27423 - DNA, 21 bp, Artificial Sequence
  source: /note="Description of Artificial Sequence: Synthetic oligonucleotide"
gttccgaagcaggtgtcgttt

SEQ ID NO: 27424 - DNA, 21 bp, Artificial Sequence
  source: /note="Description of Artificial Sequence: Synthetic oligonucleotide"
gttccgctggatcatgctgat

SEQ ID NO: 27425 - DNA, 21 bp, Artificial Sequence
  source: /note="Description of Artificial Sequence: Synthetic oligonucleotide"
gtgcctcttgatcggattcat

SEQ ID NO: 27426 - DNA, 21 bp, Artificial Sequence
  source: /note="Description of Artificial Sequence: Synthetic oligonucleotide"
gttccgcttgattcggagagt

SEQ ID NO: 27427 - DNA, 21 bp, Artificial Sequence
  source: /note="Description of Artificial Sequence: Synthetic oligonucleotide"
gttccgcttgggactgatgtt

SEQ ID NO: 27428 - DNA, 21 bp, Artificial Sequence
  source: /note="Description of Artificial Sequence: Synthetic oligonucleotide"
gtgccgttgcatacgagtctt

SEQ ID NO: 27429 - DNA, 21 bp, Artificial Sequence
  source: /note="Description of Artificial Sequence: Synthetic oligonucleotide"
gtgccgcttatttctatggat

SEQ ID NO: 27430 - DNA, 21 bp, Artificial Sequence
  source: /note="Description of Artificial Sequence: Synthetic oligonucleotide"
gttcctcttaataaggcggcg

SEQ ID NO: 27431 - DNA, 21 bp, Artificial Sequence
  source: /note="Description of Artificial Sequence: Synthetic oligonucleotide"
gttccgcttcaggagacgttt

SEQ ID NO: 27432 - DNA, 21 bp, Artificial Sequence
  source: /note="Description of Artificial Sequence: Synthetic oligonucleotide"
gtgcctttgagtggggggttt

SEQ ID NO: 27433 - DNA, 21 bp, Artificial Sequence
  source: /note="Description of Artificial Sequence: Synthetic oligonucleotide"
gtgccgctttctaatatgtcg

SEQ ID NO: 27434 - DNA, 21 bp, Artificial Sequence
  source: /note="Description of Artificial Sequence: Synthetic oligonucleotide"
gtgccgttgtcgcagttgaat

SEQ ID NO: 27435 - DNA, 21 bp, Artificial Sequence
  source: /note="Description of Artificial Sequence: Synthetic oligonucleotide"
gtgcctttgtctgtgactgtt

SEQ ID NO: 27436 - DNA, 21 bp, Artificial Sequence
  source: /note="Description of Artificial Sequence: Synthetic oligonucleotide"
gtgcctctttattctgggtcg

SEQ ID NO: 27437 - DNA, 21 bp, Artificial Sequence
  source: /note="Description of Artificial Sequence: Synthetic oligonucleotide"
gtgcctatgcagacggtgctt

SEQ ID NO: 27438 - DNA, 21 bp, Artificial Sequence
  source: /note="Description of Artificial Sequence: Synthetic oligonucleotide"
gtgcctatgtcgggtgctccg

SEQ ID NO: 27439 - DNA, 21 bp, Artificial Sequence
  source: /note="Description of Artificial Sequence: Synthetic oligonucleotide"
gttcctatgtctaggccttcg

SEQ ID NO: 27440 - DNA, 21 bp, Artificial Sequence
  source: /note="Description of Artificial Sequence: Synthetic oligonucleotide"
gtgcctaatgataggcttcag

SEQ ID NO: 27441 - DNA, 21 bp, Artificial Sequence
  source: /note="Description of Artificial Sequence: Synthetic oligonucleotide"
gttccgaatcattcgactggt

SEQ ID NO: 27442 - DNA, 21 bp, Artificial Sequence
  source: /note="Description of Artificial Sequence: Synthetic oligonucleotide"
gttcctaatcttgaggatgat

SEQ ID NO: 27443 - DNA, 21 bp, Artificial Sequence
  source: /note="Description of Artificial Sequence: Synthetic oligonucleotide"
gttccgcctgctgctcgttcg

SEQ ID NO: 27444 - DNA, 21 bp, Artificial Sequence
  source: /note="Description of Artificial Sequence: Synthetic oligonucleotide"
gtgcctccggcgattcatgcg

SEQ ID NO: 27445 - DNA, 21 bp, Artificial Sequence
  source: /note="Description of Artificial Sequence: Synthetic oligonucleotide"
gttcctccgatttctcctagt

SEQ ID NO: 27446 - DNA, 21 bp, Artificial Sequence
  source: /note="Description of Artificial Sequence: Synthetic oligonucleotide"
gtgccgcctcttaggcaggag

SEQ ID NO: 27447 - DNA, 21 bp, Artificial Sequence
  source: /note="Description of Artificial Sequence: Synthetic oligonucleotide"
gtgcctcctctgacttcgtct

SEQ ID NO: 27448 - DNA, 21 bp, Artificial Sequence
  source: /note="Description of Artificial Sequence: Synthetic oligonucleotide"
gtgccgcctaggcatattaat

SEQ ID NO: 27449 - DNA, 21 bp, Artificial Sequence
  source: /note="Description of Artificial Sequence: Synthetic oligonucleotide"
gttccgccgcgtcagactcat

SEQ ID NO: 27450 - DNA, 21 bp, Artificial Sequence
  source: /note="Description of Artificial Sequence: Synthetic oligonucleotide"
gtgcctccgtctaggcagtct

SEQ ID NO: 27451 - DNA, 21 bp, Artificial Sequence
  source: /note="Description of Artificial Sequence: Synthetic oligonucleotide"
gttcctccttctgtgagtagg

SEQ ID NO: 27452 - DNA, 21 bp, Artificial Sequence
  source: /note="Description of Artificial Sequence: Synthetic oligonucleotide"
gttcctccggtgcagacgcct

SEQ ID NO: 27453 - DNA, 21 bp, Artificial Sequence
  source: /note="Description of Artificial Sequence: Synthetic oligonucleotide"
gtgccgccttatagtgttccg

SEQ ID NO: 27454 - DNA, 21 bp, Artificial Sequence
  source: /note="Description of Artificial Sequence: Synthetic oligonucleotide"
gttcctcagaaggtgacggtg

SEQ ID NO: 27455 - DNA, 21 bp, Artificial Sequence
  source: /note="Description of Artificial Sequence: Synthetic oligonucleotide"
gtgccgcgtgattatcggtat

SEQ ID NO: 27456 - DNA, 21 bp, Artificial Sequence
  source: /note="Description of Artificial Sequence: Synthetic oligonucleotide"
gtgcctcgggagcgggtgaat

SEQ ID NO: 27457 - DNA, 21 bp, Artificial Sequence
  source: /note="Description of Artificial Sequence: Synthetic oligonucleotide"
gtgcctaggggtgatgcggct

SEQ ID NO: 27458 - DNA, 21 bp, Artificial Sequence
  source: /note="Description of Artificial Sequence: Synthetic oligonucleotide"
gttcctcgtaatgcgccggat

SEQ ID NO: 27459 - DNA, 21 bp, Artificial Sequence
  source: /note="Description of Artificial Sequence: Synthetic oligonucleotide"
gtgcctcgtaatgtgacgatg

SEQ ID NO: 27460 - DNA, 21 bp, Artificial Sequence
  source: /note="Description of Artificial Sequence: Synthetic oligonucleotide"
gtgcctcgttctgatacgctg

SEQ ID NO: 27461 - DNA, 21 bp, Artificial Sequence
  source: /note="Description of Artificial Sequence: Synthetic oligonucleotide"
gtgccgcgtagtaatgtgagt

SEQ ID NO: 27462 - DNA, 21 bp, Artificial Sequence
  source: /note="Description of Artificial Sequence: Synthetic oligonucleotide"
gtgccgaggagtcagctgacg

SEQ ID NO: 27463 - DNA, 21 bp, Artificial Sequence
  source: /note="Description of Artificial Sequence: Synthetic oligonucleotide"
gttcctcggtctacgaatttg

SEQ ID NO: 27464 - DNA, 21 bp, Artificial Sequence
  source: /note="Description of Artificial Sequence: Synthetic oligonucleotide"
gttcctcggacggggtcgaat

SEQ ID NO: 27465 - DNA, 21 bp, Artificial Sequence
  source: /note="Description of Artificial Sequence: Synthetic oligonucleotide"
gttccgaggactctgactcct

SEQ ID NO: 27466 - DNA, 21 bp, Artificial Sequence
  source: /note="Description of Artificial Sequence: Synthetic oligonucleotide"
gttcctagtgcgactaagatt

SEQ ID NO: 27467 - DNA, 21 bp, Artificial Sequence
  source: /note="Description of Artificial Sequence: Synthetic oligonucleotide"
gtgcctagtcatattggtgcg

SEQ ID NO: 27468 - DNA, 21 bp, Artificial Sequence
  source: /note="Description of Artificial Sequence: Synthetic oligonucleotide"
gtgccttctaagccttcttat

SEQ ID NO: 27469 - DNA, 21 bp, Artificial Sequence
  source: /note="Description of Artificial Sequence: Synthetic oligonucleotide"
gttccttctaagacgcctttt

SEQ ID NO: 27470 - DNA, 21 bp, Artificial Sequence
  source: /note="Description of Artificial Sequence: Synthetic oligonucleotide"
gtgccttctccttcgtcttcg

SEQ ID NO: 27471 - DNA, 21 bp, Artificial Sequence
  source: /note="Description of Artificial Sequence: Synthetic oligonucleotide"
gtgccttctcggtctcagaat

SEQ ID NO: 27472 - DNA, 21 bp, Artificial Sequence
  source: /note="Description of Artificial Sequence: Synthetic oligonucleotide"
gttcctagttctatttctagt

SEQ ID NO: 27473 - DNA, 21 bp, Artificial Sequence
  source: /note="Description of Artificial Sequence: Synthetic oligonucleotide"
gtgccgagtgtgccgggggcg

SEQ ID NO: 27474 - DNA, 21 bp, Artificial Sequence
  source: /note="Description of Artificial Sequence: Synthetic oligonucleotide"
gttccttcggttgttcgtagt

SEQ ID NO: 27475 - DNA, 21 bp, Artificial Sequence
  source: /note="Description of Artificial Sequence: Synthetic oligonucleotide"
gttccgactgctttgatgagt

SEQ ID NO: 27476 - DNA, 21 bp, Artificial Sequence
  source: /note="Description of Artificial Sequence: Synthetic oligonucleotide"
gtgccgacggattatctgtct

SEQ ID NO: 27477 - DNA, 21 bp, Artificial Sequence
  source: /note="Description of Artificial Sequence: Synthetic oligonucleotide"
gttccgacgcattatgatcct

SEQ ID NO: 27478 - DNA, 21 bp, Artificial Sequence
  source: /note="Description of Artificial Sequence: Synthetic oligonucleotide"
gtgccgacgcggggggagttt

SEQ ID NO: 27479 - DNA, 21 bp, Artificial Sequence
  source: /note="Description of Artificial Sequence: Synthetic oligonucleotide"
gttcctacgtcggctgttaag

SEQ ID NO: 27480 - DNA, 21 bp, Artificial Sequence
  source: /note="Description of Artificial Sequence: Synthetic oligonucleotide"
gtgccgacgacttcggatttt

SEQ ID NO: 27481 - DNA, 21 bp, Artificial Sequence
  source: /note="Description of Artificial Sequence: Synthetic oligonucleotide"
gtgcctacggtttctaatatt

SEQ ID NO: 27482 - DNA, 21 bp, Artificial Sequence
  source: /note="Description of Artificial Sequence: Synthetic oligonucleotide"
gtgccggtggatattcttagt

SEQ ID NO: 27483 - DNA, 21 bp, Artificial Sequence
  source: /note="Description of Artificial Sequence: Synthetic oligonucleotide"
gttcctgttaagactagtccg

SEQ ID NO: 27484 - DNA, 21 bp, Artificial Sequence
  source: /note="Description of Artificial Sequence: Synthetic oligonucleotide"
gtgccggttaagacgacttat

SEQ ID NO: 27485 - DNA, 21 bp, Artificial Sequence
  source: /note="Description of Artificial Sequence: Synthetic oligonucleotide"
gtgcctgtgaatcctagggcg

SEQ ID NO: 27486 - DNA, 21 bp, Artificial Sequence
  source: /note="Description of Artificial Sequence: Synthetic oligonucleotide"
gttccggtgtcgcgtgctttt

SEQ ID NO: 27487 - DNA, 21 bp, Artificial Sequence
  source: /note="Description of Artificial Sequence: Synthetic oligonucleotide"
gttccgtgggattctccggtt

SEQ ID NO: 27488 - DNA, 21 bp, Artificial Sequence
  source: /note="Description of Artificial Sequence: Synthetic oligonucleotide"
gttccttatgggcaggttcat

SEQ ID NO: 27489 - DNA, 21 bp, Artificial Sequence
  source: /note="Description of Artificial Sequence: Synthetic oligonucleotide"
gttccttattcttctctgccg

SEQ ID NO: 27490 - DNA, 21 bp, Artificial Sequence
  source: /note="Description of Artificial Sequence: Synthetic oligonucleotide"
gttccttatactggtatgact

SEQ ID NO: 27491 - DNA, 21 bp, Artificial Sequence
  source: /note="Description of Artificial Sequence: Synthetic oligonucleotide"
gtgccgtatacgtctacggat

SEQ ID NO: 27492 - DNA, 21 bp, Artificial Sequence
  source: /note="Description of Artificial Sequence: Synthetic oligonucleotide"
gttcaggctggtcttcggtct

SEQ ID NO: 27493 - DNA, 21 bp, Artificial Sequence
  source: /note="Description of Artificial Sequence: Synthetic oligonucleotide"
gttcaggcttcgagtatgaag

SEQ ID NO: 27494 - DNA, 21 bp, Artificial Sequence
  source: /note="Description of Artificial Sequence: Synthetic oligonucleotide"
gttcaggatacggattcgact

SEQ ID NO: 27495 - DNA, 21 bp, Artificial Sequence
  source: /note="Description of Artificial Sequence: Synthetic oligonucleotide"
gtgcaggagcctgttgttatg

SEQ ID NO: 27496 - DNA, 21 bp, Artificial Sequence
  source: /note="Description of Artificial Sequence: Synthetic oligonucleotide"
gttcagggtggttcgaatact

SEQ ID NO: 27497 - DNA, 21 bp, Artificial Sequence
  source: /note="Description of Artificial Sequence: Synthetic oligonucleotide"
gttcagggtaggcttgctggt

SEQ ID NO: 27498 - DNA, 21 bp, Artificial Sequence
  source: /note="Description of Artificial Sequence: Synthetic oligonucleotide"
gttcaggggcgttcggggatg

SEQ ID NO: 27499 - DNA, 21 bp, Artificial Sequence
  source: /note="Description of Artificial Sequence: Synthetic oligonucleotide"
gtgcaggggtctaagcctgag

SEQ ID NO: 27500 - DNA, 21 bp, Artificial Sequence
  source: /note="Description of Artificial Sequence: Synthetic oligonucleotide"
gttcagggtacgttgccgagt

SEQ ID NO: 27501 - DNA, 21 bp, Artificial Sequence
  source: /note="Description of Artificial Sequence: Synthetic oligonucleotide"
gttcagcatcttagggctacg

SEQ ID NO: 27502 - DNA, 21 bp, Artificial Sequence
  source: /note="Description of Artificial Sequence: Synthetic oligonucleotide"
gttcagcatccgacgcgtgcg

SEQ ID NO: 27503 - DNA, 21 bp, Artificial Sequence
  source: /note="Description of Artificial Sequence: Synthetic oligonucleotide"
gttcagcatcgtatggaggtt

SEQ ID NO: 27504 - DNA, 21 bp, Artificial Sequence
  source: /note="Description of Artificial Sequence: Synthetic oligonucleotide"
gtgcagcatgttgctgagctg

SEQ ID NO: 27505 - DNA, 21 bp, Artificial Sequence
  source: /note="Description of Artificial Sequence: Synthetic oligonucleotide"
gttcagcttgcttcgaattcg

SEQ ID NO: 27506 - DNA, 21 bp, Artificial Sequence
  source: /note="Description of Artificial Sequence: Synthetic oligonucleotide"
gtgcagttgggtgggcatgtg

SEQ ID NO: 27507 - DNA, 21 bp, Artificial Sequence
  source: /note="Description of Artificial Sequence: Synthetic oligonucleotide"
gttcagatggagaggcatagt

SEQ ID NO: 27508 - DNA, 21 bp, Artificial Sequence
  source: /note="Description of Artificial Sequence: Synthetic oligonucleotide"
gtgcagatgatgcgtgatgcg

SEQ ID NO: 27509 - DNA, 21 bp, Artificial Sequence
  source: /note="Description of Artificial Sequence: Synthetic oligonucleotide"
gtgcagaatgttattggtccg

SEQ ID NO: 27510 - DNA, 21 bp, Artificial Sequence
  source: /note="Description of Artificial Sequence: Synthetic oligonucleotide"
gtgcagccggagattttggct

SEQ ID NO: 27511 - DNA, 21 bp, Artificial Sequence
  source: /note="Description of Artificial Sequence: Synthetic oligonucleotide"
gttcagccggggccgcttgtg

SEQ ID NO: 27512 - DNA, 21 bp, Artificial Sequence
  source: /note="Description of Artificial Sequence: Synthetic oligonucleotide"
gtgcagcctattaatcagtcg

SEQ ID NO: 27513 - DNA, 21 bp, Artificial Sequence
  source: /note="Description of Artificial Sequence: Synthetic oligonucleotide"
gtgcagcctttgcctgcgcat

SEQ ID NO: 27514 - DNA, 21 bp, Artificial Sequence
  source: /note="Description of Artificial Sequence: Synthetic oligonucleotide"
gtgcagccgatgatttcgaat

SEQ ID NO: 27515 - DNA, 21 bp, Artificial Sequence
  source: /note="Description of Artificial Sequence: Synthetic oligonucleotide"
gttcagcctcgtgagtatgtt

SEQ ID NO: 27516 - DNA, 21 bp, Artificial Sequence
  source: /note="Description of Artificial Sequence: Synthetic oligonucleotide"
gtgcagccggtgcagtctgat

SEQ ID NO: 27517 - DNA, 21 bp, Artificial Sequence
  source: /note="Description of Artificial Sequence: Synthetic oligonucleotide"
gtgcagcagaaggggctggcg

SEQ ID NO: 27518 - DNA, 21 bp, Artificial Sequence
  source: /note="Description of Artificial Sequence: Synthetic oligonucleotide"
gtgcagcggatgatggggcct

SEQ ID NO: 27519 - DNA, 21 bp, Artificial Sequence
  source: /note="Description of Artificial Sequence: Synthetic oligonucleotide"
gttcagtctgattcgacgtcg

SEQ ID NO: 27520 - DNA, 21 bp, Artificial Sequence
  source: /note="Description of Artificial Sequence: Synthetic oligonucleotide"
gtgcagtctattccgtcggcg

SEQ ID NO: 27521 - DNA, 21 bp, Artificial Sequence
  source: /note="Description of Artificial Sequence: Synthetic oligonucleotide"
gtgcagtcgcttcatactggt

SEQ ID NO: 27522 - DNA, 21 bp, Artificial Sequence
  source: /note="Description of Artificial Sequence: Synthetic oligonucleotide"
gtgcagagtccgacttgggtt

SEQ ID NO: 27523 - DNA, 21 bp, Artificial Sequence
  source: /note="Description of Artificial Sequence: Synthetic oligonucleotide"
gttcagtcgcggcctgattcg

SEQ ID NO: 27524 - DNA, 21 bp, Artificial Sequence
  source: /note="Description of Artificial Sequence: Synthetic oligonucleotide"
gtgcagtcgagtgtgacgttg

SEQ ID NO: 27525 - DNA, 21 bp, Artificial Sequence
  source: /note="Description of Artificial Sequence: Synthetic oligonucleotide"
gttcagtcgactcttcttgag

SEQ ID NO: 27526 - DNA, 21 bp, Artificial Sequence
  source: /note="Description of Artificial Sequence: Synthetic oligonucleotide"
gttcagagtgttatgcctcat

SEQ ID NO: 27527 - DNA, 21 bp, Artificial Sequence
  source: /note="Description of Artificial Sequence: Synthetic oligonucleotide"
gtgcagagtgttcgtatttcg

SEQ ID NO: 27528 - DNA, 21 bp, Artificial Sequence
  source: /note="Description of Artificial Sequence: Synthetic oligonucleotide"
gtgcagacggcgcctgcggag

SEQ ID NO: 27529 - DNA, 21 bp, Artificial Sequence
  source: /note="Description of Artificial Sequence: Synthetic oligonucleotide"
gtgcagacgcattctgctgct

SEQ ID NO: 27530 - DNA, 21 bp, Artificial Sequence
  source: /note="Description of Artificial Sequence: Synthetic oligonucleotide"
gttcagacgcagccgtatagg

SEQ ID NO: 27531 - DNA, 21 bp, Artificial Sequence
  source: /note="Description of Artificial Sequence: Synthetic oligonucleotide"
gttcagacgagtggttatttg

SEQ ID NO: 27532 - DNA, 21 bp, Artificial Sequence
  source: /note="Description of Artificial Sequence: Synthetic oligonucleotide"
gtgcagtatatgtcgaaggct

SEQ ID NO: 27533 - DNA, 21 bp, Artificial Sequence
  source: /note="Description of Artificial Sequence: Synthetic oligonucleotide"
gtgcagtatcctacggagtcg

SEQ ID NO: 27534 - DNA, 21 bp, Artificial Sequence
  source: /note="Description of Artificial Sequence: Synthetic oligonucleotide"
gtgcagtatagtggtactccg

SEQ ID NO: 27535 - DNA, 21 bp, Artificial Sequence
  source: /note="Description of Artificial Sequence: Synthetic oligonucleotide"
gttcgggctgatgctgcgggg

SEQ ID NO: 27536 - DNA, 21 bp, Artificial Sequence
  source: /note="Description of Artificial Sequence: Synthetic oligonucleotide"
gttagggcgttgccgctgagt

SEQ ID NO: 27537 - DNA, 21 bp, Artificial Sequence
  source: /note="Description of Artificial Sequence: Synthetic oligonucleotide"
gtgagggcgaatccgtcgacg

SEQ ID NO: 27538 - DNA, 21 bp, Artificial Sequence
  source: /note="Description of Artificial Sequence: Synthetic oligonucleotide"
gtgcgtgctcctccgaatgct

SEQ ID NO: 27539 - DNA, 21 bp, Artificial Sequence
  source: /note="Description of Artificial Sequence: Synthetic oligonucleotide"
gtgagggcgcctccttctctt

SEQ ID NO: 27540 - DNA, 21 bp, Artificial Sequence
  source: /note="Description of Artificial Sequence: Synthetic oligonucleotide"
gttagggcgccgcgggaggtt

SEQ ID NO: 27541 - DNA, 21 bp, Artificial Sequence
  source: /note="Description of Artificial Sequence: Synthetic oligonucleotide"
gttcgtgctagtaatacgttg

SEQ ID NO: 27542 - DNA, 21 bp, Artificial Sequence
  source: /note="Description of Artificial Sequence: Synthetic oligonucleotide"
gtgcgggctacgcagactgag

SEQ ID NO: 27543 - DNA, 21 bp, Artificial Sequence
  source: /note="Description of Artificial Sequence: Synthetic oligonucleotide"
gtgcgggctgtgcatccggtt

SEQ ID NO: 27544 - DNA, 21 bp, Artificial Sequence
  source: /note="Description of Artificial Sequence: Synthetic oligonucleotide"
gtgagggctgttcagattaat

SEQ ID NO: 27545 - DNA, 21 bp, Artificial Sequence
  source: /note="Description of Artificial Sequence: Synthetic oligonucleotide"
gttagggatgctgcttcttgt

SEQ ID NO: 27546 - DNA, 21 bp, Artificial Sequence
  source: /note="Description of Artificial Sequence: Synthetic oligonucleotide"
gttcgtgatgatgttgggtgg

SEQ ID NO: 27547 - DNA, 21 bp, Artificial Sequence
  source: /note="Description of Artificial Sequence: Synthetic oligonucleotide"
gttcgggatcctgtgacttcg

SEQ ID NO: 27548 - DNA, 21 bp, Artificial Sequence
  source: /note="Description of Artificial Sequence: Synthetic oligonucleotide"
gtgcgggattcgatgcattcg

SEQ ID NO: 27549 - DNA, 21 bp, Artificial Sequence
  source: /note="Description of Artificial Sequence: Synthetic oligonucleotide"
gttcgtgatacgatggggcag

SEQ ID NO: 27550 - DNA, 21 bp, Artificial Sequence
  source: /note="Description of Artificial Sequence: Synthetic oligonucleotide"
gtgcgtgattggcagacgcag

SEQ ID NO: 27551 - DNA, 21 bp, Artificial Sequence
  source: /note="Description of Artificial Sequence: Synthetic oligonucleotide"
gtgagggaggctacttctttg

SEQ ID NO: 27552 - DNA, 21 bp, Artificial Sequence
  source: /note="Description of Artificial Sequence: Synthetic oligonucleotide"
gttcgggaggtgctggggtcg

SEQ ID NO: 27553 - DNA, 21 bp, Artificial Sequence
  source: /note="Description of Artificial Sequence: Synthetic oligonucleotide"
gttaggtttaatgagcaggcg

SEQ ID NO: 27554 - DNA, 21 bp, Artificial Sequence
  source: /note="Description of Artificial Sequence: Synthetic oligonucleotide"
gtgcgttttaatggtcagact

SEQ ID NO: 27555 - DNA, 21 bp, Artificial Sequence
  source: /note="Description of Artificial Sequence: Synthetic oligonucleotide"
gttcgtggtgcgcttacgccg

SEQ ID NO: 27556 - DNA, 21 bp, Artificial Sequence
  source: /note="Description of Artificial Sequence: Synthetic oligonucleotide"
gtgaggggtgcggttgcggct

SEQ ID NO: 27557 - DNA, 21 bp, Artificial Sequence
  source: /note="Description of Artificial Sequence: Synthetic oligonucleotide"
gtgcgtgggattgtggctccg

SEQ ID NO: 27558 - DNA, 21 bp, Artificial Sequence
  source: /note="Description of Artificial Sequence: Synthetic oligonucleotide"
gttaggggtcctgagatgacg

SEQ ID NO: 27559 - DNA, 21 bp, Artificial Sequence
  source: /note="Description of Artificial Sequence: Synthetic oligonucleotide"
gtgcgtggtcctggggaggat

SEQ ID NO: 27560 - DNA, 21 bp, Artificial Sequence
  source: /note="Description of Artificial Sequence: Synthetic oligonucleotide"
gttagggggcctcatgatacg

SEQ ID NO: 27561 - DNA, 21 bp, Artificial Sequence
  source: /note="Description of Artificial Sequence: Synthetic oligonucleotide"
gttagggggtctctttcgatg

SEQ ID NO: 27562 - DNA, 21 bp, Artificial Sequence
  source: /note="Description of Artificial Sequence: Synthetic oligonucleotide"
gttcgtggtagtctgactagt

SEQ ID NO: 27563 - DNA, 21 bp, Artificial Sequence
  source: /note="Description of Artificial Sequence: Synthetic oligonucleotide"
gtgagggggtcgcagtatgcg

SEQ ID NO: 27564 - DNA, 21 bp, Artificial Sequence
  source: /note="Description of Artificial Sequence: Synthetic oligonucleotide"
gttcgtgggtcgacgcaggct

SEQ ID NO: 27565 - DNA, 21 bp, Artificial Sequence
  source: /note="Description of Artificial Sequence: Synthetic oligonucleotide"
gttcggggtgtgcagctggat

SEQ ID NO: 27566 - DNA, 21 bp, Artificial Sequence
  source: /note="Description of Artificial Sequence: Synthetic oligonucleotide"
gttaggggtgtttcggattcg

SEQ ID NO: 27567 - DNA, 21 bp, Artificial Sequence
  source: /note="Description of Artificial Sequence: Synthetic oligonucleotide"
gtgcgtcatattaagctggag

SEQ ID NO: 27568 - DNA, 21 bp, Artificial Sequence
  source: /note="Description of Artificial Sequence: Synthetic oligonucleotide"
gtgcgtcatccggggccggag

SEQ ID NO: 27569 - DNA, 21 bp, Artificial Sequence
  source: /note="Description of Artificial Sequence: Synthetic oligonucleotide"
gtgcggaaggattatcatctt

SEQ ID NO: 27570 - DNA, 21 bp, Artificial Sequence
  source: /note="Description of Artificial Sequence: Synthetic oligonucleotide"
gtgcgtctggatgcttctatt

SEQ ID NO: 27571 - DNA, 21 bp, Artificial Sequence
  source: /note="Description of Artificial Sequence: Synthetic oligonucleotide"
gttcgtttggatatggctgct

SEQ ID NO: 27572 - DNA, 21 bp, Artificial Sequence
  source: /note="Description of Artificial Sequence: Synthetic oligonucleotide"
gttaggctggatcgggagggt

SEQ ID NO: 27573 - DNA, 21 bp, Artificial Sequence
  source: /note="Description of Artificial Sequence: Synthetic oligonucleotide"
gttcggctgccggatacgtcg

SEQ ID NO: 27574 - DNA, 21 bp, Artificial Sequence
  source: /note="Description of Artificial Sequence: Synthetic oligonucleotide"
gtgaggttgcagggtgggctt

SEQ ID NO: 27575 - DNA, 21 bp, Artificial Sequence
  source: /note="Description of Artificial Sequence: Synthetic oligonucleotide"
gtgaggctgtcggaggttcct

SEQ ID NO: 27576 - DNA, 21 bp, Artificial Sequence
  source: /note="Description of Artificial Sequence: Synthetic oligonucleotide"
gttcggatgctgcctggtgat

SEQ ID NO: 27577 - DNA, 21 bp, Artificial Sequence
  source: /note="Description of Artificial Sequence: Synthetic oligonucleotide"
gtgcggaatgctccgggggcg

SEQ ID NO: 27578 - DNA, 21 bp, Artificial Sequence
  source: /note="Description of Artificial Sequence: Synthetic oligonucleotide"
gttcggaatgcgtctgatttg

SEQ ID NO: 27579 - DNA, 21 bp, Artificial Sequence
  source: /note="Description of Artificial Sequence: Synthetic oligonucleotide"
gttcggaatattccgtcgatg

SEQ ID NO: 27580 - DNA, 21 bp, Artificial Sequence
  source: /note="Description of Artificial Sequence: Synthetic oligonucleotide"
gttaggaatagtgcgatgaat

SEQ ID NO: 27581 - DNA, 21 bp, Artificial Sequence
  source: /note="Description of Artificial Sequence: Synthetic oligonucleotide"
gtgaggccggctgatcagttt

SEQ ID NO: 27582 - DNA, 21 bp, Artificial Sequence
  source: /note="Description of Artificial Sequence: Synthetic oligonucleotide"
gtgaggcctgagcgtgagaat

SEQ ID NO: 27583 - DNA, 21 bp, Artificial Sequence
  source: /note="Description of Artificial Sequence: Synthetic oligonucleotide"
gttcggccgggtaagttgatt

SEQ ID NO: 27584 - DNA, 21 bp, Artificial Sequence
  source: /note="Description of Artificial Sequence: Synthetic oligonucleotide"
gtgaggccgcatatgactgtg

SEQ ID NO: 27585 - DNA, 21 bp, Artificial Sequence
  source: /note="Description of Artificial Sequence: Synthetic oligonucleotide"
gttcggcctattccgcctaat

SEQ ID NO: 27586 - DNA, 21 bp, Artificial Sequence
  source: /note="Description of Artificial Sequence: Synthetic oligonucleotide"
gttcggccgttgtcgattggt

SEQ ID NO: 27587 - DNA, 21 bp, Artificial Sequence
  source: /note="Description of Artificial Sequence: Synthetic oligonucleotide"
gttcgtcctcagacggcgtat

SEQ ID NO: 27588 - DNA, 21 bp, Artificial Sequence
  source: /note="Description of Artificial Sequence: Synthetic oligonucleotide"
gtgcgtcctcgtgatggtatg

SEQ ID NO: 27589 - DNA, 21 bp, Artificial Sequence
  source: /note="Description of Artificial Sequence: Synthetic oligonucleotide"
gttaggccgtctattttggct

SEQ ID NO: 27590 - DNA, 21 bp, Artificial Sequence
  source: /note="Description of Artificial Sequence: Synthetic oligonucleotide"
gttaggccttcgtctcttgag

SEQ ID NO: 27591 - DNA, 21 bp, Artificial Sequence
  source: /note="Description of Artificial Sequence: Synthetic oligonucleotide"
gttaggcctacgaattcgggt

SEQ ID NO: 27592 - DNA, 21 bp, Artificial Sequence
  source: /note="Description of Artificial Sequence: Synthetic oligonucleotide"
gttcggcctactcagaattct

SEQ ID NO: 27593 - DNA, 21 bp, Artificial Sequence
  source: /note="Description of Artificial Sequence: Synthetic oligonucleotide"
gttcggcctgttaaggaggtt

SEQ ID NO: 27594 - DNA, 21 bp, Artificial Sequence
  source: /note="Description of Artificial Sequence: Synthetic oligonucleotide"
gttaggcctgttaatggggtg

SEQ ID NO: 27595 - DNA, 21 bp, Artificial Sequence
  source: /note="Description of Artificial Sequence: Synthetic oligonucleotide"
gttcggcaggagattatttcg

SEQ ID NO: 27596 - DNA, 21 bp, Artificial Sequence
  source: /note="Description of Artificial Sequence: Synthetic oligonucleotide"
gtgaggcagatgacgccgggg

SEQ ID NO: 27597 - DNA, 21 bp, Artificial Sequence
  source: /note="Description of Artificial Sequence: Synthetic oligonucleotide"
gtgaggcagccgggggttgat

SEQ ID NO: 27598 - DNA, 21 bp, Artificial Sequence
  source: /note="Description of Artificial Sequence: Synthetic oligonucleotide"
gttcgtcagtcttcgaatacg

SEQ ID NO: 27599 - DNA, 21 bp, Artificial Sequence
  source: /note="Description of Artificial Sequence: Synthetic oligonucleotide"
gttcggagggtggcttctgag

SEQ ID NO: 27600 - DNA, 21 bp, Artificial Sequence
  source: /note="Description of Artificial Sequence: Synthetic oligonucleotide"
gttcgttcggctatttctgat

SEQ ID NO: 27601 - DNA, 21 bp, Artificial Sequence
  source: /note="Description of Artificial Sequence: Synthetic oligonucleotide"
gttcggagtgcgacttttcat

SEQ ID NO: 27602 - DNA, 21 bp, Artificial Sequence
  source: /note="Description of Artificial Sequence: Synthetic oligonucleotide"
gtgcggtctttggagcagtcg

SEQ ID NO: 27603 - DNA, 21 bp, Artificial Sequence
  source: /note="Description of Artificial Sequence: Synthetic oligonucleotide"
gttaggtctccgtcgcattgt

SEQ ID NO: 27604 - DNA, 21 bp, Artificial Sequence
  source: /note="Description of Artificial Sequence: Synthetic oligonucleotide"
gtgaggtctcagcttccgccg

SEQ ID NO: 27605 - DNA, 21 bp, Artificial Sequence
  source: /note="Description of Artificial Sequence: Synthetic oligonucleotide"
gtgcggagttcgttggatcgg

SEQ ID NO: 27606 - DNA, 21 bp, Artificial Sequence
  source: /note="Description of Artificial Sequence: Synthetic oligonucleotide"
gttcggtcgtctacgtatacg

SEQ ID NO: 27607 - DNA, 21 bp, Artificial Sequence
  source: /note="Description of Artificial Sequence: Synthetic oligonucleotide"
gtgaggtctgtggctcctgag

SEQ ID NO: 27608 - DNA, 21 bp, Artificial Sequence
  source: /note="Description of Artificial Sequence: Synthetic oligonucleotide"
gtgaggactttgccttctccg

SEQ ID NO: 27609 - DNA, 21 bp, Artificial Sequence
  source: /note="Description of Artificial Sequence: Synthetic oligonucleotide"
gtgaggacgatgccgcattcg

SEQ ID NO: 27610 - DNA, 21 bp, Artificial Sequence
  source: /note="Description of Artificial Sequence: Synthetic oligonucleotide"
gttcggactccgtttgaggct

SEQ ID NO: 27611 - DNA, 21 bp, Artificial Sequence
  source: /note="Description of Artificial Sequence: Synthetic oligonucleotide"
gtgaggacgcagggtcttagt

SEQ ID NO: 27612 - DNA, 21 bp, Artificial Sequence
  source: /note="Description of Artificial Sequence: Synthetic oligonucleotide"
gttcggacgcagggtactaat

SEQ ID NO: 27613 - DNA, 21 bp, Artificial Sequence
  source: /note="Description of Artificial Sequence: Synthetic oligonucleotide"
gtgcgtacttctattggtact

SEQ ID NO: 27614 - DNA, 21 bp, Artificial Sequence
  source: /note="Description of Artificial Sequence: Synthetic oligonucleotide"
gttcgtacgtcgccgatgtcg

SEQ ID NO: 27615 - DNA, 21 bp, Artificial Sequence
  source: /note="Description of Artificial Sequence: Synthetic oligonucleotide"
gttcgggttgctgtgcctatg

SEQ ID NO: 27616 - DNA, 21 bp, Artificial Sequence
  source: /note="Description of Artificial Sequence: Synthetic oligonucleotide"
gttcgggtggggacgattggt

SEQ ID NO: 27617 - DNA, 21 bp, Artificial Sequence
  source: /note="Description of Artificial Sequence: Synthetic oligonucleotide"
gtgcgggtgggtactttgaat

SEQ ID NO: 27618 - DNA, 21 bp, Artificial Sequence
  source: /note="Description of Artificial Sequence: Synthetic oligonucleotide"
gttcgtgtgatgggttctagt

SEQ ID NO: 27619 - DNA, 21 bp, Artificial Sequence
  source: /note="Description of Artificial Sequence: Synthetic oligonucleotide"
gtttctgcggcttctttgact

SEQ ID NO: 27620 - DNA, 21 bp, Artificial Sequence
  source: /note="Description of Artificial Sequence: Synthetic oligonucleotide"
gttagtgcggctacgtctttt

SEQ ID NO: 27621 - DNA, 21 bp, Artificial Sequence
  source: /note="Description of Artificial Sequence: Synthetic oligonucleotide"
gtgtctgcgcatactaattct

SEQ ID NO: 27622 - DNA, 21 bp, Artificial Sequence
  source: /note="Description of Artificial Sequence: Synthetic oligonucleotide"
gtgagtgcgattatggatgtg

SEQ ID NO: 27623 - DNA, 21 bp, Artificial Sequence
  source: /note="Description of Artificial Sequence: Synthetic oligonucleotide"
gtgtcggctatttctgctact

SEQ ID NO: 27624 - DNA, 21 bp, Artificial Sequence
  source: /note="Description of Artificial Sequence: Synthetic oligonucleotide"
gtgagtgctcctgaggatcat

SEQ ID NO: 27625 - DNA, 21 bp, Artificial Sequence
  source: /note="Description of Artificial Sequence: Synthetic oligonucleotide"
gtgtctgctcagattagtatt

SEQ ID NO: 27626 - DNA, 21 bp, Artificial Sequence
  source: /note="Description of Artificial Sequence: Synthetic oligonucleotide"
gtttctgcgcgggagagtgtt

SEQ ID NO: 27627 - DNA, 21 bp, Artificial Sequence
  source: /note="Description of Artificial Sequence: Synthetic oligonucleotide"
gtgtcggctaggtcttttcag

SEQ ID NO: 27628 - DNA, 21 bp, Artificial Sequence
  source: /note="Description of Artificial Sequence: Synthetic oligonucleotide"
gtttctgctagtgctgggcgt

SEQ ID NO: 27629 - DNA, 21 bp, Artificial Sequence
  source: /note="Description of Artificial Sequence: Synthetic oligonucleotide"
gtttctgcgagtcttgctctg

SEQ ID NO: 27630 - DNA, 21 bp, Artificial Sequence
  source: /note="Description of Artificial Sequence: Synthetic oligonucleotide"
gtttctgctagttctagtgct

SEQ ID NO: 27631 - DNA, 21 bp, Artificial Sequence
  source: /note="Description of Artificial Sequence: Synthetic oligonucleotide"
gtgtctgcgacgcatgttcag

SEQ ID NO: 27632 - DNA, 21 bp, Artificial Sequence
  source: /note="Description of Artificial Sequence: Synthetic oligonucleotide"
gtgagtgcgactacgtcggtg

SEQ ID NO: 27633 - DNA, 21 bp, Artificial Sequence
  source: /note="Description of Artificial Sequence: Synthetic oligonucleotide"
gtttcggatgataagagttct

SEQ ID NO: 27634 - DNA, 21 bp, Artificial Sequence
  source: /note="Description of Artificial Sequence: Synthetic oligonucleotide"
gtttctgatggtaataagttg

SEQ ID NO: 27635 - DNA, 21 bp, Artificial Sequence
  source: /note="Description of Artificial Sequence: Synthetic oligonucleotide"
gtgtcggataatctttggtct

SEQ ID NO: 27636 - DNA, 21 bp, Artificial Sequence
  source: /note="Description of Artificial Sequence: Synthetic oligonucleotide"
gtgtcggattcttatcagtgg

SEQ ID NO: 27637 - DNA, 21 bp, Artificial Sequence
  source: /note="Description of Artificial Sequence: Synthetic oligonucleotide"
gtttctgatgtggctttttat

SEQ ID NO: 27638 - DNA, 21 bp, Artificial Sequence
  source: /note="Description of Artificial Sequence: Synthetic oligonucleotide"
gtttctgatgttacgtcggat

SEQ ID NO: 27639 - DNA, 21 bp, Artificial Sequence
  source: /note="Description of Artificial Sequence: Synthetic oligonucleotide"
gtgagtgattatcttactcag

SEQ ID NO: 27640 - DNA, 21 bp, Artificial Sequence
  source: /note="Description of Artificial Sequence: Synthetic oligonucleotide"
gtttcgtttccgtatgaggag

SEQ ID NO: 27641 - DNA, 21 bp, Artificial Sequence
  source: /note="Description of Artificial Sequence: Synthetic oligonucleotide"
gtttcgtttcagcctcttggt

SEQ ID NO: 27642 - DNA, 21 bp, Artificial Sequence
  source: /note="Description of Artificial Sequence: Synthetic oligonucleotide"
gtgagtggttttaatcagcat

SEQ ID NO: 27643 - DNA, 21 bp, Artificial Sequence
  source: /note="Description of Artificial Sequence: Synthetic oligonucleotide"
gtttctgggcctaatcattat

SEQ ID NO: 27644 - DNA, 21 bp, Artificial Sequence
  source: /note="Description of Artificial Sequence: Synthetic oligonucleotide"
gtgagtggttcgctgcagtat

SEQ ID NO: 27645 - DNA, 21 bp, Artificial Sequence
  source: /note="Description of Artificial Sequence: Synthetic oligonucleotide"
gtgagtggtagtacgcggact

SEQ ID NO: 27646 - DNA, 21 bp, Artificial Sequence
  source: /note="Description of Artificial Sequence: Synthetic oligonucleotide"
gttagtcatgctacgcatcag

SEQ ID NO: 27647 - DNA, 21 bp, Artificial Sequence
  source: /note="Description of Artificial Sequence: Synthetic oligonucleotide"
gtgagtcatggtatgaatatg

SEQ ID NO: 27648 - DNA, 21 bp, Artificial Sequence
  source: /note="Description of Artificial Sequence: Synthetic oligonucleotide"
gtgagtcatggtatgtcgtct

SEQ ID NO: 27649 - DNA, 21 bp, Artificial Sequence
  source: /note="Description of Artificial Sequence: Synthetic oligonucleotide"
gttagtcatccgaatgcgccg

SEQ ID NO: 27650 - DNA, 21 bp, Artificial Sequence
  source: /note="Description of Artificial Sequence: Synthetic oligonucleotide"
gtttcgcatactatgcaggag

SEQ ID NO: 27651 - DNA, 21 bp, Artificial Sequence
  source: /note="Description of Artificial Sequence: Synthetic oligonucleotide"
gtttcgattgcgggggcttct

SEQ ID NO: 27652 - DNA, 21 bp, Artificial Sequence
  source: /note="Description of Artificial Sequence: Synthetic oligonucleotide"
gtgtctatttcgattccgtcg

SEQ ID NO: 27653 - DNA, 21 bp, Artificial Sequence
  source: /note="Description of Artificial Sequence: Synthetic oligonucleotide"
gtgtcgatttctatgcctcct

SEQ ID NO: 27654 - DNA, 21 bp, Artificial Sequence
  source: /note="Description of Artificial Sequence: Synthetic oligonucleotide"
gtgagtaaggagatgattctt

SEQ ID NO: 27655 - DNA, 21 bp, Artificial Sequence
  source: /note="Description of Artificial Sequence: Synthetic oligonucleotide"
gtttctaagcctactaattct

SEQ ID NO: 27656 - DNA, 21 bp, Artificial Sequence
  source: /note="Description of Artificial Sequence: Synthetic oligonucleotide"
gttagtaagtctatttcgagt

SEQ ID NO: 27657 - DNA, 21 bp, Artificial Sequence
  source: /note="Description of Artificial Sequence: Synthetic oligonucleotide"
gttagtcttgggtatccggat

SEQ ID NO: 27658 - DNA, 21 bp, Artificial Sequence
  source: /note="Description of Artificial Sequence: Synthetic oligonucleotide"
gtgtcgctgttgcctacgtcg

SEQ ID NO: 27659 - DNA, 21 bp, Artificial Sequence
  source: /note="Description of Artificial Sequence: Synthetic oligonucleotide"
gtgagtctgttgactagtaag

SEQ ID NO: 27660 - DNA, 21 bp, Artificial Sequence
  source: /note="Description of Artificial Sequence: Synthetic oligonucleotide"
gtgtcgctgcctcaggagcgg

SEQ ID NO: 27661 - DNA, 21 bp, Artificial Sequence
  source: /note="Description of Artificial Sequence: Synthetic oligonucleotide"
gtttctctgcaggggattgat

SEQ ID NO: 27662 - DNA, 21 bp, Artificial Sequence
  source: /note="Description of Artificial Sequence: Synthetic oligonucleotide"
gtttctcttcgggcgcctact

SEQ ID NO: 27663 - DNA, 21 bp, Artificial Sequence
  source: /note="Description of Artificial Sequence: Synthetic oligonucleotide"
gtttctctgcggcatacggcg

SEQ ID NO: 27664 - DNA, 21 bp, Artificial Sequence
  source: /note="Description of Artificial Sequence: Synthetic oligonucleotide"
gtttctctgtcgccgatttct

SEQ ID NO: 27665 - DNA, 21 bp, Artificial Sequence
  source: /note="Description of Artificial Sequence: Synthetic oligonucleotide"
gtgtcgctttcgactactgct

SEQ ID NO: 27666 - DNA, 21 bp, Artificial Sequence
  source: /note="Description of Artificial Sequence: Synthetic oligonucleotide"
gtgtcgctgacgctgtctagt

SEQ ID NO: 27667 - DNA, 21 bp, Artificial Sequence
  source: /note="Description of Artificial Sequence: Synthetic oligonucleotide"
gtttcgatgggtcggccgttg

SEQ ID NO: 27668 - DNA, 21 bp, Artificial Sequence
  source: /note="Description of Artificial Sequence: Synthetic oligonucleotide"
gtttctatgcatttggagccg

SEQ ID NO: 27669 - DNA, 21 bp, Artificial Sequence
  source: /note="Description of Artificial Sequence: Synthetic oligonucleotide"
gtgtctatgaagaatcttcat

SEQ ID NO: 27670 - DNA, 21 bp, Artificial Sequence
  source: /note="Description of Artificial Sequence: Synthetic oligonucleotide"
gtttcgatgatggagccggag

SEQ ID NO: 27671 - DNA, 21 bp, Artificial Sequence
  source: /note="Description of Artificial Sequence: Synthetic oligonucleotide"
gttagtatgccttctaggagt

SEQ ID NO: 27672 - DNA, 21 bp, Artificial Sequence
  source: /note="Description of Artificial Sequence: Synthetic oligonucleotide"
gtttcgaatgctgctaggatg

SEQ ID NO: 27673 - DNA, 21 bp, Artificial Sequence
  source: /note="Description of Artificial Sequence: Synthetic oligonucleotide"
gtgtcgaattttcagaatcct

SEQ ID NO: 27674 - DNA, 21 bp, Artificial Sequence
  source: /note="Description of Artificial Sequence: Synthetic oligonucleotide"
gtgtcgaatatttctagtccg

SEQ ID NO: 27675 - DNA, 21 bp, Artificial Sequence
  source: /note="Description of Artificial Sequence: Synthetic oligonucleotide"
gtttctaatatgcagtttgcg

SEQ ID NO: 27676 - DNA, 21 bp, Artificial Sequence
  source: /note="Description of Artificial Sequence: Synthetic oligonucleotide"
gtgtcgaatcctgatttgatg

SEQ ID NO: 27677 - DNA, 21 bp, Artificial Sequence
  source: /note="Description of Artificial Sequence: Synthetic oligonucleotide"
gtgtcgaatcctcaggtgagt

SEQ ID NO: 27678 - DNA, 21 bp, Artificial Sequence
  source: /note="Description of Artificial Sequence: Synthetic oligonucleotide"
gtttctaatcaggctgggtat

SEQ ID NO: 27679 - DNA, 21 bp, Artificial Sequence
  source: /note="Description of Artificial Sequence: Synthetic oligonucleotide"
gtgtcgaatcagaagcaggtt

SEQ ID NO: 27680 - DNA, 21 bp, Artificial Sequence
  source: /note="Description of Artificial Sequence: Synthetic oligonucleotide"
gtttctaatcgttctactcag

SEQ ID NO: 27681 - DNA, 21 bp, Artificial Sequence
  source: /note="Description of Artificial Sequence: Synthetic oligonucleotide"
gttagtaattcgatggcgcat

SEQ ID NO: 27682 - DNA, 21 bp, Artificial Sequence
  source: /note="Description of Artificial Sequence: Synthetic oligonucleotide"
gtgtctaatacgttgctggtg

SEQ ID NO: 27683 - DNA, 21 bp, Artificial Sequence
  source: /note="Description of Artificial Sequence: Synthetic oligonucleotide"
gtgtctcctgcttttcataag

SEQ ID NO: 27684 - DNA, 21 bp, Artificial Sequence
  source: /note="Description of Artificial Sequence: Synthetic oligonucleotide"
gtttctcctgcgtggcatggg

SEQ ID NO: 27685 - DNA, 21 bp, Artificial Sequence
  source: /note="Description of Artificial Sequence: Synthetic oligonucleotide"
gttagtccggaggaggatcgg

SEQ ID NO: 27686 - DNA, 21 bp, Artificial Sequence
  source: /note="Description of Artificial Sequence: Synthetic oligonucleotide"
gtgtctcctgagcctttgcgg

SEQ ID NO: 27687 - DNA, 21 bp, Artificial Sequence
  source: /note="Description of Artificial Sequence: Synthetic oligonucleotide"
gtttcgccggggaatccggcg

SEQ ID NO: 27688 - DNA, 21 bp, Artificial Sequence
  source: /note="Description of Artificial Sequence: Synthetic oligonucleotide"
gtgagtccgcatccggtgcat

SEQ ID NO: 27689 - DNA, 21 bp, Artificial Sequence
  source: /note="Description of Artificial Sequence: Synthetic oligonucleotide"
gtgtctccgctgctgccgagt

SEQ ID NO: 27690 - DNA, 21 bp, Artificial Sequence
  source: /note="Description of Artificial Sequence: Synthetic oligonucleotide"
gtttctcctcttaatacttct

SEQ ID NO: 27691 - DNA, 21 bp, Artificial Sequence
  source: /note="Description of Artificial Sequence: Synthetic oligonucleotide"
gttagtccgatgacggagatt

SEQ ID NO: 27692 - DNA, 21 bp, Artificial Sequence
  source: /note="Description of Artificial Sequence: Synthetic oligonucleotide"
gtgagtccgcgtccggggcag

SEQ ID NO: 27693 - DNA, 21 bp, Artificial Sequence
  source: /note="Description of Artificial Sequence: Synthetic oligonucleotide"
gtgagtccttcgaataggggg

SEQ ID NO: 27694 - DNA, 21 bp, Artificial Sequence
  source: /note="Description of Artificial Sequence: Synthetic oligonucleotide"
gtttctcctagttctgctctt

SEQ ID NO: 27695 - DNA, 21 bp, Artificial Sequence
  source: /note="Description of Artificial Sequence: Synthetic oligonucleotide"
gtgtctccgacgcagcatttt

SEQ ID NO: 27696 - DNA, 21 bp, Artificial Sequence
  source: /note="Description of Artificial Sequence: Synthetic oligonucleotide"
gtgtcgcctacttattctttg

SEQ ID NO: 27697 - DNA, 21 bp, Artificial Sequence
  source: /note="Description of Artificial Sequence: Synthetic oligonucleotide"
gttagtccggtttatacgtcg

SEQ ID NO: 27698 - DNA, 21 bp, Artificial Sequence
  source: /note="Description of Artificial Sequence: Synthetic oligonucleotide"
gtttcgccttatcctcgggat

SEQ ID NO: 27699 - DNA, 21 bp, Artificial Sequence
  source: /note="Description of Artificial Sequence: Synthetic oligonucleotide"
gtgagtcagcttgggagtccg

SEQ ID NO: 27700 - DNA, 21 bp, Artificial Sequence
  source: /note="Description of Artificial Sequence: Synthetic oligonucleotide"
gtgtctcagttgacgcaggtg

SEQ ID NO: 27701 - DNA, 21 bp, Artificial Sequence
  source: /note="Description of Artificial Sequence: Synthetic oligonucleotide"
gtgtcgcagccttcttatggt

SEQ ID NO: 27702 - DNA, 21 bp, Artificial Sequence
  source: /note="Description of Artificial Sequence: Synthetic oligonucleotide"
gtttctcagtcttatacgaat

SEQ ID NO: 27703 - DNA, 21 bp, Artificial Sequence
  source: /note="Description of Artificial Sequence: Synthetic oligonucleotide"
gtgtctcaggtgaagcagggt

SEQ ID NO: 27704 - DNA, 21 bp, Artificial Sequence
  source: /note="Description of Artificial Sequence: Synthetic oligonucleotide"
gtgtcgcgtgctactccgaat

SEQ ID NO: 27705 - DNA, 21 bp, Artificial Sequence
  source: /note="Description of Artificial Sequence: Synthetic oligonucleotide"
gtttcgcgggagattaattct

SEQ ID NO: 27706 - DNA, 21 bp, Artificial Sequence
  source: /note="Description of Artificial Sequence: Synthetic oligonucleotide"
gtgtcgaggcaggattctctg

SEQ ID NO: 27707 - DNA, 21 bp, Artificial Sequence
  source: /note="Description of Artificial Sequence: Synthetic oligonucleotide"
gtttcgcggagtggtaatagt

SEQ ID NO: 27708 - DNA, 21 bp, Artificial Sequence
  source: /note="Description of Artificial Sequence: Synthetic oligonucleotide"
gtttctcggacgatggatact

SEQ ID NO: 27709 - DNA, 21 bp, Artificial Sequence
  source: /note="Description of Artificial Sequence: Synthetic oligonucleotide"
gtttctagggtggagttggct

SEQ ID NO: 27710 - DNA, 21 bp, Artificial Sequence
  source: /note="Description of Artificial Sequence: Synthetic oligonucleotide"
gtttcgtctgctcatagtatt

SEQ ID NO: 27711 - DNA, 21 bp, Artificial Sequence
  source: /note="Description of Artificial Sequence: Synthetic oligonucleotide"
gtttcgtctgctcatacgtct

SEQ ID NO: 27712 - DNA, 21 bp, Artificial Sequence
  source: /note="Description of Artificial Sequence: Synthetic oligonucleotide"
gtttcgtcggctattagttat

SEQ ID NO: 27713 - DNA, 21 bp, Artificial Sequence
  source: /note="Description of Artificial Sequence: Synthetic oligonucleotide"
gttagttcggcgcggggtacg

SEQ ID NO: 27714 - DNA, 21 bp, Artificial Sequence
  source: /note="Description of Artificial Sequence: Synthetic oligonucleotide"
gtttcgtctgcttcgcctatg

SEQ ID NO: 27715 - DNA, 21 bp, Artificial Sequence
  source: /note="Description of Artificial Sequence: Synthetic oligonucleotide"
gtgtcttcggataggctgttg

SEQ ID NO: 27716 - DNA, 21 bp, Artificial Sequence
  source: /note="Description of Artificial Sequence: Synthetic oligonucleotide"
gtttcgtcggattattcgaat

SEQ ID NO: 27717 - DNA, 21 bp, Artificial Sequence
  source: /note="Description of Artificial Sequence: Synthetic oligonucleotide"
gttagttcgtttcttgaggat

SEQ ID NO: 27718 - DNA, 21 bp, Artificial Sequence
  source: /note="Description of Artificial Sequence: Synthetic oligonucleotide"
gttagttcgctggagcttgct

SEQ ID NO: 27719 - DNA, 21 bp, Artificial Sequence
  source: /note="Description of Artificial Sequence: Synthetic oligonucleotide"
gtgagttcgcttaagacttat

SEQ ID NO: 27720 - DNA, 21 bp, Artificial Sequence
  source: /note="Description of Artificial Sequence: Synthetic oligonucleotide"
gtgtcgtctctgcgtggtccg

SEQ ID NO: 27721 - DNA, 21 bp, Artificial Sequence
  source: /note="Description of Artificial Sequence: Synthetic oligonucleotide"
gtttcttctctgagtagtttg

SEQ ID NO: 27722 - DNA, 21 bp, Artificial Sequence
  source: /note="Description of Artificial Sequence: Synthetic oligonucleotide"
gtttcgtctatgctggatgcg

SEQ ID NO: 27723 - DNA, 21 bp, Artificial Sequence
  source: /note="Description of Artificial Sequence: Synthetic oligonucleotide"
gtgtcgagtatgaatattgtt

SEQ ID NO: 27724 - DNA, 21 bp, Artificial Sequence
  source: /note="Description of Artificial Sequence: Synthetic oligonucleotide"
gttagttctatgcctgtgcct

SEQ ID NO: 27725 - DNA, 21 bp, Artificial Sequence
  source: /note="Description of Artificial Sequence: Synthetic oligonucleotide"
gtttcgagtaattcgtttgcg

SEQ ID NO: 27726 - DNA, 21 bp, Artificial Sequence
  source: /note="Description of Artificial Sequence: Synthetic oligonucleotide"
gtgtcgtctcctgatagtaat

SEQ ID NO: 27727 - DNA, 21 bp, Artificial Sequence
  source: /note="Description of Artificial Sequence: Synthetic oligonucleotide"
gtttcttctcctttgagtggt

SEQ ID NO: 27728 - DNA, 21 bp, Artificial Sequence
  source: /note="Description of Artificial Sequence: Synthetic oligonucleotide"
gtgtcttctcctcctgatctt

SEQ ID NO: 27729 - DNA, 21 bp, Artificial Sequence
  source: /note="Description of Artificial Sequence: Synthetic oligonucleotide"
gttagttcgcctcgggagcat

SEQ ID NO: 27730 - DNA, 21 bp, Artificial Sequence
  source: /note="Description of Artificial Sequence: Synthetic oligonucleotide"
gtttcgtcgcagaatgttttt

SEQ ID NO: 27731 - DNA, 21 bp, Artificial Sequence
  source: /note="Description of Artificial Sequence: Synthetic oligonucleotide"
gttagttcgcagaggaatggg

SEQ ID NO: 27732 - DNA, 21 bp, Artificial Sequence
  source: /note="Description of Artificial Sequence: Synthetic oligonucleotide"
gtgtcgtcgcgttatcatgct

SEQ ID NO: 27733 - DNA, 21 bp, Artificial Sequence
  source: /note="Description of Artificial Sequence: Synthetic oligonucleotide"
gtgagtagtagtggtatgacg

SEQ ID NO: 27734 - DNA, 21 bp, Artificial Sequence
  source: /note="Description of Artificial Sequence: Synthetic oligonucleotide"
gtgtcttcgtcgcttatgtcg

SEQ ID NO: 27735 - DNA, 21 bp, Artificial Sequence
  source: /note="Description of Artificial Sequence: Synthetic oligonucleotide"
gtttcttctagtcagatgcct

SEQ ID NO: 27736 - DNA, 21 bp, Artificial Sequence
  source: /note="Description of Artificial Sequence: Synthetic oligonucleotide"
gtttcttcttcggttcttagg

SEQ ID NO: 27737 - DNA, 21 bp, Artificial Sequence
  source: /note="Description of Artificial Sequence: Synthetic oligonucleotide"
gtgtcgagtactattgtgatg

SEQ ID NO: 27738 - DNA, 21 bp, Artificial Sequence
  source: /note="Description of Artificial Sequence: Synthetic oligonucleotide"
gtgtcgtctgtggtgtcgggt

SEQ ID NO: 27739 - DNA, 21 bp, Artificial Sequence
  source: /note="Description of Artificial Sequence: Synthetic oligonucleotide"
gtgtctactgctcatcagtcg

SEQ ID NO: 27740 - DNA, 21 bp, Artificial Sequence
  source: /note="Description of Artificial Sequence: Synthetic oligonucleotide"
gtttcgacgtttggtcctacg

SEQ ID NO: 27741 - DNA, 21 bp, Artificial Sequence
  source: /note="Description of Artificial Sequence: Synthetic oligonucleotide"
gttagtacgggtttgacgaag

SEQ ID NO: 27742 - DNA, 21 bp, Artificial Sequence
  source: /note="Description of Artificial Sequence: Synthetic oligonucleotide"
gtttcgactggttatgctgtt

SEQ ID NO: 27743 - DNA, 21 bp, Artificial Sequence
  source: /note="Description of Artificial Sequence: Synthetic oligonucleotide"
gtttctacgattgcgtttgag

SEQ ID NO: 27744 - DNA, 21 bp, Artificial Sequence
  source: /note="Description of Artificial Sequence: Synthetic oligonucleotide"
gtgtctacgatttcgtcgttg

SEQ ID NO: 27745 - DNA, 21 bp, Artificial Sequence
  source: /note="Description of Artificial Sequence: Synthetic oligonucleotide"
gtttctacgcttcaggcgggg

SEQ ID NO: 27746 - DNA, 21 bp, Artificial Sequence
  source: /note="Description of Artificial Sequence: Synthetic oligonucleotide"
gtttcgactatgcggagtccg

SEQ ID NO: 27747 - DNA, 21 bp, Artificial Sequence
  source: /note="Description of Artificial Sequence: Synthetic oligonucleotide"
gttagtactcctaataataag

SEQ ID NO: 27748 - DNA, 21 bp, Artificial Sequence
  source: /note="Description of Artificial Sequence: Synthetic oligonucleotide"
gtgagtacgcagacttataag

SEQ ID NO: 27749 - DNA, 21 bp, Artificial Sequence
  source: /note="Description of Artificial Sequence: Synthetic oligonucleotide"
gtgtcgacgaggcagcttctt

SEQ ID NO: 27750 - DNA, 21 bp, Artificial Sequence
  source: /note="Description of Artificial Sequence: Synthetic oligonucleotide"
gtgagtactagtgttctgagg

SEQ ID NO: 27751 - DNA, 21 bp, Artificial Sequence
  source: /note="Description of Artificial Sequence: Synthetic oligonucleotide"
gtgagtacgacgtttaaggtg

SEQ ID NO: 27752 - DNA, 21 bp, Artificial Sequence
  source: /note="Description of Artificial Sequence: Synthetic oligonucleotide"
gtttcggttaaggtgcatgat

SEQ ID NO: 27753 - DNA, 21 bp, Artificial Sequence
  source: /note="Description of Artificial Sequence: Synthetic oligonucleotide"
gtttctgtgcagtcgtcgcgg

SEQ ID NO: 27754 - DNA, 21 bp, Artificial Sequence
  source: /note="Description of Artificial Sequence: Synthetic oligonucleotide"
gtgtcggtgtcgacgcatcat

SEQ ID NO: 27755 - DNA, 21 bp, Artificial Sequence
  source: /note="Description of Artificial Sequence: Synthetic oligonucleotide"
gtttcggttagtgtgggtgag

SEQ ID NO: 27756 - DNA, 21 bp, Artificial Sequence
  source: /note="Description of Artificial Sequence: Synthetic oligonucleotide"
gtttctgttactgcgggtggg

SEQ ID NO: 27757 - DNA, 21 bp, Artificial Sequence
  source: /note="Description of Artificial Sequence: Synthetic oligonucleotide"
gtttctgttacttctgctggt

SEQ ID NO: 27758 - DNA, 21 bp, Artificial Sequence
  source: /note="Description of Artificial Sequence: Synthetic oligonucleotide"
gtgtcttatgctatggagaat

SEQ ID NO: 27759 - DNA, 21 bp, Artificial Sequence
  source: /note="Description of Artificial Sequence: Synthetic oligonucleotide"
gtgtcgtatccggctcaggct

SEQ ID NO: 27760 - DNA, 21 bp, Artificial Sequence
  source: /note="Description of Artificial Sequence: Synthetic oligonucleotide"
gtgactgctgggcctatgcgt

SEQ ID NO: 27761 - DNA, 21 bp, Artificial Sequence
  source: /note="Description of Artificial Sequence: Synthetic oligonucleotide"
gtgactgcgcttactattgct

SEQ ID NO: 27762 - DNA, 21 bp, Artificial Sequence
  source: /note="Description of Artificial Sequence: Synthetic oligonucleotide"
gtgactgctctggttaaggat

SEQ ID NO: 27763 - DNA, 21 bp, Artificial Sequence
  source: /note="Description of Artificial Sequence: Synthetic oligonucleotide"
gtgactgctaatttgcctcag

SEQ ID NO: 27764 - DNA, 21 bp, Artificial Sequence
  source: /note="Description of Artificial Sequence: Synthetic oligonucleotide"
gttactgctaatgttcttcct

SEQ ID NO: 27765 - DNA, 21 bp, Artificial Sequence
  source: /note="Description of Artificial Sequence: Synthetic oligonucleotide"
gttactgctccggtgactggt

SEQ ID NO: 27766 - DNA, 21 bp, Artificial Sequence
  source: /note="Description of Artificial Sequence: Synthetic oligonucleotide"
gttactgcgcagtcgtcggtg

SEQ ID NO: 27767 - DNA, 21 bp, Artificial Sequence
  source: /note="Description of Artificial Sequence: Synthetic oligonucleotide"
gtgactgcgcgttctctggct

SEQ ID NO: 27768 - DNA, 21 bp, Artificial Sequence
  source: /note="Description of Artificial Sequence: Synthetic oligonucleotide"
gtgactgctagtcatcgtgtt

SEQ ID NO: 27769 - DNA, 21 bp, Artificial Sequence
  source: /note="Description of Artificial Sequence: Synthetic oligonucleotide"
gttactgatgctgtgactacg

SEQ ID NO: 27770 - DNA, 21 bp, Artificial Sequence
  source: /note="Description of Artificial Sequence: Synthetic oligonucleotide"
gttactgataatgtgcggaat

SEQ ID NO: 27771 - DNA, 21 bp, Artificial Sequence
  source: /note="Description of Artificial Sequence: Synthetic oligonucleotide"
gtgactgattcgactgatgat

SEQ ID NO: 27772 - DNA, 21 bp, Artificial Sequence
  source: /note="Description of Artificial Sequence: Synthetic oligonucleotide"
gttacggatacgcgtgagagg

SEQ ID NO: 27773 - DNA, 21 bp, Artificial Sequence
  source: /note="Description of Artificial Sequence: Synthetic oligonucleotide"
gttacggaggcgcgttctgcg

SEQ ID NO: 27774 - DNA, 21 bp, Artificial Sequence
  source: /note="Description of Artificial Sequence: Synthetic oligonucleotide"
gtgacggaggagagtgatatg

SEQ ID NO: 27775 - DNA, 21 bp, Artificial Sequence
  source: /note="Description of Artificial Sequence: Synthetic oligonucleotide"
gttacggaggagtctaatact

SEQ ID NO: 27776 - DNA, 21 bp, Artificial Sequence
  source: /note="Description of Artificial Sequence: Synthetic oligonucleotide"
gttacggagcatctgaagaat

SEQ ID NO: 27777 - DNA, 21 bp, Artificial Sequence
  source: /note="Description of Artificial Sequence: Synthetic oligonucleotide"
gttactgagaggatgactctt

SEQ ID NO: 27778 - DNA, 21 bp, Artificial Sequence
  source: /note="Description of Artificial Sequence: Synthetic oligonucleotide"
gttacgttttcttcttctggt

SEQ ID NO: 27779 - DNA, 21 bp, Artificial Sequence
  source: /note="Description of Artificial Sequence: Synthetic oligonucleotide"
gttactggggcgcggttggct

SEQ ID NO: 27780 - DNA, 21 bp, Artificial Sequence
  source: /note="Description of Artificial Sequence: Synthetic oligonucleotide"
gttactggtcatgcgattctt

SEQ ID NO: 27781 - DNA, 21 bp, Artificial Sequence
  source: /note="Description of Artificial Sequence: Synthetic oligonucleotide"
gttactggtaagccttctttg

SEQ ID NO: 27782 - DNA, 21 bp, Artificial Sequence
  source: /note="Description of Artificial Sequence: Synthetic oligonucleotide"
gttactgggccgggtttgagg

SEQ ID NO: 27783 - DNA, 21 bp, Artificial Sequence
  source: /note="Description of Artificial Sequence: Synthetic oligonucleotide"
gtgacggggacgaggactgtg

SEQ ID NO: 27784 - DNA, 21 bp, Artificial Sequence
  source: /note="Description of Artificial Sequence: Synthetic oligonucleotide"
gttacgcatcttatgcagggg

SEQ ID NO: 27785 - DNA, 21 bp, Artificial Sequence
  source: /note="Description of Artificial Sequence: Synthetic oligonucleotide"
gttacgcatcctaatttgagt

SEQ ID NO: 27786 - DNA, 21 bp, Artificial Sequence
  source: /note="Description of Artificial Sequence: Synthetic oligonucleotide"
gtgactcatacggagtttccg

SEQ ID NO: 27787 - DNA, 21 bp, Artificial Sequence
  source: /note="Description of Artificial Sequence: Synthetic oligonucleotide"
gtgactcatactggtcataag

SEQ ID NO: 27788 - DNA, 21 bp, Artificial Sequence
  source: /note="Description of Artificial Sequence: Synthetic oligonucleotide"
gtgacgcattatagttcggtg

SEQ ID NO: 27789 - DNA, 21 bp, Artificial Sequence
  source: /note="Description of Artificial Sequence: Synthetic oligonucleotide"
gtgactattgatgattatcct

SEQ ID NO: 27790 - DNA, 21 bp, Artificial Sequence
  source: /note="Description of Artificial Sequence: Synthetic oligonucleotide"
gttacgaaggcttctgctcct

SEQ ID NO: 27791 - DNA, 21 bp, Artificial Sequence
  source: /note="Description of Artificial Sequence: Synthetic oligonucleotide"
gttactttgaagcctttgagt

SEQ ID NO: 27792 - DNA, 21 bp, Artificial Sequence
  source: /note="Description of Artificial Sequence: Synthetic oligonucleotide"
gtgactcttctggcgtcgagg

SEQ ID NO: 27793 - DNA, 21 bp, Artificial Sequence
  source: /note="Description of Artificial Sequence: Synthetic oligonucleotide"
gtgactttgccgcttactcgt

SEQ ID NO: 27794 - DNA, 21 bp, Artificial Sequence
  source: /note="Description of Artificial Sequence: Synthetic oligonucleotide"
gttactctgcagcgtcctggg

SEQ ID NO: 27795 - DNA, 21 bp, Artificial Sequence
  source: /note="Description of Artificial Sequence: Synthetic oligonucleotide"
gtgacgctgagtgctgagggg

SEQ ID NO: 27796 - DNA, 21 bp, Artificial Sequence
  source: /note="Description of Artificial Sequence: Synthetic oligonucleotide"
gtgactctgtcggataggctg

SEQ ID NO: 27797 - DNA, 21 bp, Artificial Sequence
  source: /note="Description of Artificial Sequence: Synthetic oligonucleotide"
gttactatgagtactattcgt

SEQ ID NO: 27798 - DNA, 21 bp, Artificial Sequence
  source: /note="Description of Artificial Sequence: Synthetic oligonucleotide"
gtgacgaatagggtgcatcct

SEQ ID NO: 27799 - DNA, 21 bp, Artificial Sequence
  source: /note="Description of Artificial Sequence: Synthetic oligonucleotide"
gttactccggatctgcgtcat

SEQ ID NO: 27800 - DNA, 21 bp, Artificial Sequence
  source: /note="Description of Artificial Sequence: Synthetic oligonucleotide"
gttactccggattcgctgaag

SEQ ID NO: 27801 - DNA, 21 bp, Artificial Sequence
  source: /note="Description of Artificial Sequence: Synthetic oligonucleotide"
gttactcctgattataggaat

SEQ ID NO: 27802 - DNA, 21 bp, Artificial Sequence
  source: /note="Description of Artificial Sequence: Synthetic oligonucleotide"
gtgactccgggtcttgcttat

SEQ ID NO: 27803 - DNA, 21 bp, Artificial Sequence
  source: /note="Description of Artificial Sequence: Synthetic oligonucleotide"
gtgacgcctctgcttacggcg

SEQ ID NO: 27804 - DNA, 21 bp, Artificial Sequence
  source: /note="Description of Artificial Sequence: Synthetic oligonucleotide"
gtgacgcctcagacgaatttt

SEQ ID NO: 27805 - DNA, 21 bp, Artificial Sequence
  source: /note="Description of Artificial Sequence: Synthetic oligonucleotide"
gtgactccggttgggaagacg

SEQ ID NO: 27806 - DNA, 21 bp, Artificial Sequence
  source: /note="Description of Artificial Sequence: Synthetic oligonucleotide"
gttacgcagcatacttctacg

SEQ ID NO: 27807 - DNA, 21 bp, Artificial Sequence
  source: /note="Description of Artificial Sequence: Synthetic oligonucleotide"
gtgactcagattctgaggact

SEQ ID NO: 27808 - DNA, 21 bp, Artificial Sequence
  source: /note="Description of Artificial Sequence: Synthetic oligonucleotide"
gtgacgcagccgcatgcttct

SEQ ID NO: 27809 - DNA, 21 bp, Artificial Sequence
  source: /note="Description of Artificial Sequence: Synthetic oligonucleotide"
gttacgcgtgcgttgcatgat

SEQ ID NO: 27810 - DNA, 21 bp, Artificial Sequence
  source: /note="Description of Artificial Sequence: Synthetic oligonucleotide"
gttactcgtatggagtctgct

SEQ ID NO: 27811 - DNA, 21 bp, Artificial Sequence
  source: /note="Description of Artificial Sequence: Synthetic oligonucleotide"
gttacgtcggctcttgtgcgt

SEQ ID NO: 27812 - DNA, 21 bp, Artificial Sequence
  source: /note="Description of Artificial Sequence: Synthetic oligonucleotide"
gtgacttctgctatgcagggt

SEQ ID NO: 27813 - DNA, 21 bp, Artificial Sequence
  source: /note="Description of Artificial Sequence: Synthetic oligonucleotide"
gtgacgtctgcgtctacgcat

SEQ ID NO: 27814 - DNA, 21 bp, Artificial Sequence
  source: /note="Description of Artificial Sequence: Synthetic oligonucleotide"
gtgacttcttttgtggctccg

SEQ ID NO: 27815 - DNA, 21 bp, Artificial Sequence
  source: /note="Description of Artificial Sequence: Synthetic oligonucleotide"
gtgacttcgcatactggggag

SEQ ID NO: 27816 - DNA, 21 bp, Artificial Sequence
  source: /note="Description of Artificial Sequence: Synthetic oligonucleotide"
gttacttcgccgacgtttgag

SEQ ID NO: 27817 - DNA, 21 bp, Artificial Sequence
  source: /note="Description of Artificial Sequence: Synthetic oligonucleotide"
gttactagtcggtcggctgtt

SEQ ID NO: 27818 - DNA, 21 bp, Artificial Sequence
  source: /note="Description of Artificial Sequence: Synthetic oligonucleotide"
gtgacgtcgtcgacgcagttg

SEQ ID NO: 27819 - DNA, 21 bp, Artificial Sequence
  source: /note="Description of Artificial Sequence: Synthetic oligonucleotide"
gtgacttcgactagtactaat

SEQ ID NO: 27820 - DNA, 21 bp, Artificial Sequence
  source: /note="Description of Artificial Sequence: Synthetic oligonucleotide"
gtgactagtgtttcgccgatt

SEQ ID NO: 27821 - DNA, 21 bp, Artificial Sequence
  source: /note="Description of Artificial Sequence: Synthetic oligonucleotide"
gttactactgctacggggatt

SEQ ID NO: 27822 - DNA, 21 bp, Artificial Sequence
  source: /note="Description of Artificial Sequence: Synthetic oligonucleotide"
gttacgacggagcctcggttt

SEQ ID NO: 27823 - DNA, 21 bp, Artificial Sequence
  source: /note="Description of Artificial Sequence: Synthetic oligonucleotide"
gtgactacgattcgggctcat

SEQ ID NO: 27824 - DNA, 21 bp, Artificial Sequence
  source: /note="Description of Artificial Sequence: Synthetic oligonucleotide"
gtgactactaagcagacgtgt

SEQ ID NO: 27825 - DNA, 21 bp, Artificial Sequence
  source: /note="Description of Artificial Sequence: Synthetic oligonucleotide"
gttactactaatggtcctatt

SEQ ID NO: 27826 - DNA, 21 bp, Artificial Sequence
  source: /note="Description of Artificial Sequence: Synthetic oligonucleotide"
gtgacgactcagtttgagtct

SEQ ID NO: 27827 - DNA, 21 bp, Artificial Sequence
  source: /note="Description of Artificial Sequence: Synthetic oligonucleotide"
gtgactacgaggccgtatccg

SEQ ID NO: 27828 - DNA, 21 bp, Artificial Sequence
  source: /note="Description of Artificial Sequence: Synthetic oligonucleotide"
gtgacgacgagtcgttatctg

SEQ ID NO: 27829 - DNA, 21 bp, Artificial Sequence
  source: /note="Description of Artificial Sequence: Synthetic oligonucleotide"
gtgactacgagtacttcgcgt

SEQ ID NO: 27830 - DNA, 21 bp, Artificial Sequence
  source: /note="Description of Artificial Sequence: Synthetic oligonucleotide"
gtgacgacgactcagattact

SEQ ID NO: 27831 - DNA, 21 bp, Artificial Sequence
  source: /note="Description of Artificial Sequence: Synthetic oligonucleotide"
gtgacgacggtgattcttgat

SEQ ID NO: 27832 - DNA, 21 bp, Artificial Sequence
  source: /note="Description of Artificial Sequence: Synthetic oligonucleotide"
gttacggttcattcgcatttt

SEQ ID NO: 27833 - DNA, 21 bp, Artificial Sequence
  source: /note="Description of Artificial Sequence: Synthetic oligonucleotide"
gttacggttcctcttccgtcg

SEQ ID NO: 27834 - DNA, 21 bp, Artificial Sequence
  source: /note="Description of Artificial Sequence: Synthetic oligonucleotide"
gttactgtgcagatgaatgtt

SEQ ID NO: 27835 - DNA, 21 bp, Artificial Sequence
  source: /note="Description of Artificial Sequence: Synthetic oligonucleotide"
gtgacggtgagggggtcgatt

SEQ ID NO: 27836 - DNA, 21 bp, Artificial Sequence
  source: /note="Description of Artificial Sequence: Synthetic oligonucleotide"
gttacggtgactgggacgatt

SEQ ID NO: 27837 - DNA, 21 bp, Artificial Sequence
  source: /note="Description of Artificial Sequence: Synthetic oligonucleotide"
gtgacttattcgccgcttggg

SEQ ID NO: 27838 - DNA, 21 bp, Artificial Sequence
  source: /note="Description of Artificial Sequence: Synthetic oligonucleotide"
gtggttgctgggcgtagtagt

SEQ ID NO: 27839 - DNA, 21 bp, Artificial Sequence
  source: /note="Description of Artificial Sequence: Synthetic oligonucleotide"
gtggtggctcagccgggtcat

SEQ ID NO: 27840 - DNA, 21 bp, Artificial Sequence
  source: /note="Description of Artificial Sequence: Synthetic oligonucleotide"
gtggtggctacgacgctgaat

SEQ ID NO: 27841 - DNA, 21 bp, Artificial Sequence
  source: /note="Description of Artificial Sequence: Synthetic oligonucleotide"
gtggtggattctcctcgggct

SEQ ID NO: 27842 - DNA, 21 bp, Artificial Sequence
  source: /note="Description of Artificial Sequence: Synthetic oligonucleotide"
gttgttgatgttcctttgcgg

SEQ ID NO: 27843 - DNA, 21 bp, Artificial Sequence
  source: /note="Description of Artificial Sequence: Synthetic oligonucleotide"
gttgttgagacttttgagccg

SEQ ID NO: 27844 - DNA, 21 bp, Artificial Sequence
  source: /note="Description of Artificial Sequence: Synthetic oligonucleotide"
gtggttggtgatgggacgatt

SEQ ID NO: 27845 - DNA, 21 bp, Artificial Sequence
  source: /note="Description of Artificial Sequence: Synthetic oligonucleotide"
gtggtgggtgatcaggctgat

SEQ ID NO: 27846 - DNA, 21 bp, Artificial Sequence
  source: /note="Description of Artificial Sequence: Synthetic oligonucleotide"
gttgtgggtgggcagttgttg

SEQ ID NO: 27847 - DNA, 21 bp, Artificial Sequence
  source: /note="Description of Artificial Sequence: Synthetic oligonucleotide"
gttgtggggattcgtggggag

SEQ ID NO: 27848 - DNA, 21 bp, Artificial Sequence
  source: /note="Description of Artificial Sequence: Synthetic oligonucleotide"
gttgttgggatgggtacgggt

SEQ ID NO: 27849 - DNA, 21 bp, Artificial Sequence
  source: /note="Description of Artificial Sequence: Synthetic oligonucleotide"
gttgtgggtccgtcgttgccg

SEQ ID NO: 27850 - DNA, 21 bp, Artificial Sequence
  source: /note="Description of Artificial Sequence: Synthetic oligonucleotide"
gttgtgggtcgtcaggagcgg

SEQ ID NO: 27851 - DNA, 21 bp, Artificial Sequence
  source: /note="Description of Artificial Sequence: Synthetic oligonucleotide"
gttgttgggaggtcgaatcct

SEQ ID NO: 27852 - DNA, 21 bp, Artificial Sequence
  source: /note="Description of Artificial Sequence: Synthetic oligonucleotide"
gttgtgggtagtcctactcgg

SEQ ID NO: 27853 - DNA, 21 bp, Artificial Sequence
  source: /note="Description of Artificial Sequence: Synthetic oligonucleotide"
gtggtggggtctagtggtccg

SEQ ID NO: 27854 - DNA, 21 bp, Artificial Sequence
  source: /note="Description of Artificial Sequence: Synthetic oligonucleotide"
gttgttcatccgcctggtcag

SEQ ID NO: 27855 - DNA, 21 bp, Artificial Sequence
  source: /note="Description of Artificial Sequence: Synthetic oligonucleotide"
gttgtgcatccgagtccgggt

SEQ ID NO: 27856 - DNA, 21 bp, Artificial Sequence
  source: /note="Description of Artificial Sequence: Synthetic oligonucleotide"
gttgttcattctaatgagccg

SEQ ID NO: 27857 - DNA, 21 bp, Artificial Sequence
  source: /note="Description of Artificial Sequence: Synthetic oligonucleotide"
gtggtgcatacgatgtctgtt

SEQ ID NO: 27858 - DNA, 21 bp, Artificial Sequence
  source: /note="Description of Artificial Sequence: Synthetic oligonucleotide"
gtggtgcatgtttctcatcct

SEQ ID NO: 27859 - DNA, 21 bp, Artificial Sequence
  source: /note="Description of Artificial Sequence: Synthetic oligonucleotide"
gttgttcatgtggtgaattcg

SEQ ID NO: 27860 - DNA, 21 bp, Artificial Sequence
  source: /note="Description of Artificial Sequence: Synthetic oligonucleotide"
gtggtgattgatcagaatggg

SEQ ID NO: 27861 - DNA, 21 bp, Artificial Sequence
  source: /note="Description of Artificial Sequence: Synthetic oligonucleotide"
gttgttttgaaggataatcat

SEQ ID NO: 27862 - DNA, 21 bp, Artificial Sequence
  source: /note="Description of Artificial Sequence: Synthetic oligonucleotide"
gttgtgatgcgggatgatccg

SEQ ID NO: 27863 - DNA, 21 bp, Artificial Sequence
  source: /note="Description of Artificial Sequence: Synthetic oligonucleotide"
gttgtgaatgcgtctgctaat

SEQ ID NO: 27864 - DNA, 21 bp, Artificial Sequence
  source: /note="Description of Artificial Sequence: Synthetic oligonucleotide"
gttgtgaataatttgaggatt

SEQ ID NO: 27865 - DNA, 21 bp, Artificial Sequence
  source: /note="Description of Artificial Sequence: Synthetic oligonucleotide"
gtggttaatcaggctcagttg

SEQ ID NO: 27866 - DNA, 21 bp, Artificial Sequence
  source: /note="Description of Artificial Sequence: Synthetic oligonucleotide"
gtggttaatacgaaggcgaat

SEQ ID NO: 27867 - DNA, 21 bp, Artificial Sequence
  source: /note="Description of Artificial Sequence: Synthetic oligonucleotide"
gtggtgaatactaagtctggt

SEQ ID NO: 27868 - DNA, 21 bp, Artificial Sequence
  source: /note="Description of Artificial Sequence: Synthetic oligonucleotide"
gtggtgcctgcgctgaagatg

SEQ ID NO: 27869 - DNA, 21 bp, Artificial Sequence
  source: /note="Description of Artificial Sequence: Synthetic oligonucleotide"
gttgttccgcattcgaggcag

SEQ ID NO: 27870 - DNA, 21 bp, Artificial Sequence
  source: /note="Description of Artificial Sequence: Synthetic oligonucleotide"
gtggtgccgttgggtcctgtt

SEQ ID NO: 27871 - DNA, 21 bp, Artificial Sequence
  source: /note="Description of Artificial Sequence: Synthetic oligonucleotide"
gttgttccgcgtgatccgggt

SEQ ID NO: 27872 - DNA, 21 bp, Artificial Sequence
  source: /note="Description of Artificial Sequence: Synthetic oligonucleotide"
gtggtgcctaggatgactggg

SEQ ID NO: 27873 - DNA, 21 bp, Artificial Sequence
  source: /note="Description of Artificial Sequence: Synthetic oligonucleotide"
gttgtgccgcggccgggtatg

SEQ ID NO: 27874 - DNA, 21 bp, Artificial Sequence
  source: /note="Description of Artificial Sequence: Synthetic oligonucleotide"
gttgttccgcgtagtggggat

SEQ ID NO: 27875 - DNA, 21 bp, Artificial Sequence
  source: /note="Description of Artificial Sequence: Synthetic oligonucleotide"
gtggttcctactgatgatggt

SEQ ID NO: 27876 - DNA, 21 bp, Artificial Sequence
  source: /note="Description of Artificial Sequence: Synthetic oligonucleotide"
gtggtgcagcctagggcgggt

SEQ ID NO: 27877 - DNA, 21 bp, Artificial Sequence
  source: /note="Description of Artificial Sequence: Synthetic oligonucleotide"
gtggttcagcagtcgtctctt

SEQ ID NO: 27878 - DNA, 21 bp, Artificial Sequence
  source: /note="Description of Artificial Sequence: Synthetic oligonucleotide"
gtggttcgggcttcgtctgtg

SEQ ID NO: 27879 - DNA, 21 bp, Artificial Sequence
  source: /note="Description of Artificial Sequence: Synthetic oligonucleotide"
gtggtgcgtgggtcgtcggtt

SEQ ID NO: 27880 - DNA, 21 bp, Artificial Sequence
  source: /note="Description of Artificial Sequence: Synthetic oligonucleotide"
gtggtgcggaatgcggggggg

SEQ ID NO: 27881 - DNA, 21 bp, Artificial Sequence
  source: /note="Description of Artificial Sequence: Synthetic oligonucleotide"
gttgttcgtaatgctattaat

SEQ ID NO: 27882 - DNA, 21 bp, Artificial Sequence
  source: /note="Description of Artificial Sequence: Synthetic oligonucleotide"
gttgttcggccttctggtctt

SEQ ID NO: 27883 - DNA, 21 bp, Artificial Sequence
  source: /note="Description of Artificial Sequence: Synthetic oligonucleotide"
gtggtttctgctccgcttgtt

SEQ ID NO: 27884 - DNA, 21 bp, Artificial Sequence
  source: /note="Description of Artificial Sequence: Synthetic oligonucleotide"
gtggtttcgtttgatagggct

SEQ ID NO: 27885 - DNA, 21 bp, Artificial Sequence
  source: /note="Description of Artificial Sequence: Synthetic oligonucleotide"
gtggtgtctgggtctcggccg

SEQ ID NO: 27886 - DNA, 21 bp, Artificial Sequence
  source: /note="Description of Artificial Sequence: Synthetic oligonucleotide"
gttgtttcgcatatttcggtg

SEQ ID NO: 27887 - DNA, 21 bp, Artificial Sequence
  source: /note="Description of Artificial Sequence: Synthetic oligonucleotide"
gtggttagtattgcgagggtt

SEQ ID NO: 27888 - DNA, 21 bp, Artificial Sequence
  source: /note="Description of Artificial Sequence: Synthetic oligonucleotide"
gtggtttcgcagccgtctccg

SEQ ID NO: 27889 - DNA, 21 bp, Artificial Sequence
  source: /note="Description of Artificial Sequence: Synthetic oligonucleotide"
gttgttagtcgtccgatttct

SEQ ID NO: 27890 - DNA, 21 bp, Artificial Sequence
  source: /note="Description of Artificial Sequence: Synthetic oligonucleotide"
gtggtttctcggtcgtataat

SEQ ID NO: 27891 - DNA, 21 bp, Artificial Sequence
  source: /note="Description of Artificial Sequence: Synthetic oligonucleotide"
gttgtttctcgtgttgcgtcg

SEQ ID NO: 27892 - DNA, 21 bp, Artificial Sequence
  source: /note="Description of Artificial Sequence: Synthetic oligonucleotide"
gttgtttcttcgggttcgttg

SEQ ID NO: 27893 - DNA, 21 bp, Artificial Sequence
  source: /note="Description of Artificial Sequence: Synthetic oligonucleotide"
gtggtgtcgtcgtcgttgatg

SEQ ID NO: 27894 - DNA, 21 bp, Artificial Sequence
  source: /note="Description of Artificial Sequence: Synthetic oligonucleotide"
gtggtgagtacgactttgcct

SEQ ID NO: 27895 - DNA, 21 bp, Artificial Sequence
  source: /note="Description of Artificial Sequence: Synthetic oligonucleotide"
gtggtttctgttgcgacttcg

SEQ ID NO: 27896 - DNA, 21 bp, Artificial Sequence
  source: /note="Description of Artificial Sequence: Synthetic oligonucleotide"
gttgttacggattcggggggt

SEQ ID NO: 27897 - DNA, 21 bp, Artificial Sequence
  source: /note="Description of Artificial Sequence: Synthetic oligonucleotide"
gttgtgactagtgcttcgggt

SEQ ID NO: 27898 - DNA, 21 bp, Artificial Sequence
  source: /note="Description of Artificial Sequence: Synthetic oligonucleotide"
gttgttacgactaggattact

SEQ ID NO: 27899 - DNA, 21 bp, Artificial Sequence
  source: /note="Description of Artificial Sequence: Synthetic oligonucleotide"
gtggtggtggctggtagtgag

SEQ ID NO: 27900 - DNA, 21 bp, Artificial Sequence
  source: /note="Description of Artificial Sequence: Synthetic oligonucleotide"
gtttgggctgatgataatgtg

SEQ ID NO: 27901 - DNA, 21 bp, Artificial Sequence
  source: /note="Description of Artificial Sequence: Synthetic oligonucleotide"
gtgtgggctaggggttctgag

SEQ ID NO: 27902 - DNA, 21 bp, Artificial Sequence
  source: /note="Description of Artificial Sequence: Synthetic oligonucleotide"
gtgtggcctgcttcgggtact

SEQ ID NO: 27903 - DNA, 21 bp, Artificial Sequence
  source: /note="Description of Artificial Sequence: Synthetic oligonucleotide"
gtgtggcagccttcgaatgat

SEQ ID NO: 27904 - DNA, 21 bp, Artificial Sequence
  source: /note="Description of Artificial Sequence: Synthetic oligonucleotide"
gtttggtctgggtcttcggat

SEQ ID NO: 27905 - DNA, 21 bp, Artificial Sequence
  source: /note="Description of Artificial Sequence: Synthetic oligonucleotide"
gtttggactcatgagacgtcg

SEQ ID NO: 27906 - DNA, 21 bp, Artificial Sequence
  source: /note="Description of Artificial Sequence: Synthetic oligonucleotide"
gtgtatgcgcctgagaagcgt

SEQ ID NO: 27907 - DNA, 21 bp, Artificial Sequence
  source: /note="Description of Artificial Sequence: Synthetic oligonucleotide"
gtttatgcgacgttgcctgag

SEQ ID NO: 27908 - DNA, 21 bp, Artificial Sequence
  source: /note="Description of Artificial Sequence: Synthetic oligonucleotide"
gtttatgagcctagtaagtat

SEQ ID NO: 27909 - DNA, 21 bp, Artificial Sequence
  source: /note="Description of Artificial Sequence: Synthetic oligonucleotide"
gtttatgagtcgaatcgtttt

SEQ ID NO: 27910 - DNA, 21 bp, Artificial Sequence
  source: /note="Description of Artificial Sequence: Synthetic oligonucleotide"
gtttatgggtattctggtagt

SEQ ID NO: 27911 - DNA, 21 bp, Artificial Sequence
  source: /note="Description of Artificial Sequence: Synthetic oligonucleotide"
gtttatcatccgaatgagttt

SEQ ID NO: 27912 - DNA, 21 bp, Artificial Sequence
  source: /note="Description of Artificial Sequence: Synthetic oligonucleotide"
gtgtatattggtcggcaggag

SEQ ID NO: 27913 - DNA, 21 bp, Artificial Sequence
  source: /note="Description of Artificial Sequence: Synthetic oligonucleotide"
gtttataaggctagtaattat

SEQ ID NO: 27914 - DNA, 21 bp, Artificial Sequence
  source: /note="Description of Artificial Sequence: Synthetic oligonucleotide"
gtttatttgaagagtagtact

SEQ ID NO: 27915 - DNA, 21 bp, Artificial Sequence
  source: /note="Description of Artificial Sequence: Synthetic oligonucleotide"
gtttataatgctggtgttgat

SEQ ID NO: 27916 - DNA, 21 bp, Artificial Sequence
  source: /note="Description of Artificial Sequence: Synthetic oligonucleotide"
gtttataatacttcgactgct

SEQ ID NO: 27917 - DNA, 21 bp, Artificial Sequence
  source: /note="Description of Artificial Sequence: Synthetic oligonucleotide"
gtgtatccgccgagtacgact

SEQ ID NO: 27918 - DNA, 21 bp, Artificial Sequence
  source: /note="Description of Artificial Sequence: Synthetic oligonucleotide"
gtttatccgagggatttgact

SEQ ID NO: 27919 - DNA, 21 bp, Artificial Sequence
  source: /note="Description of Artificial Sequence: Synthetic oligonucleotide"
gtttatcgggatagtactccg

SEQ ID NO: 27920 - DNA, 21 bp, Artificial Sequence
  source: /note="Description of Artificial Sequence: Synthetic oligonucleotide"
gtgtatcgttctcatgagacg

SEQ ID NO: 27921 - DNA, 21 bp, Artificial Sequence
  source: /note="Description of Artificial Sequence: Synthetic oligonucleotide"
gtgtattcgcttggggggctg

SEQ ID NO: 27922 - DNA, 21 bp, Artificial Sequence
  source: /note="Description of Artificial Sequence: Synthetic oligonucleotide"
gtgtattctaatatgactggg

SEQ ID NO: 27923 - DNA, 21 bp, Artificial Sequence
  source: /note="Description of Artificial Sequence: Synthetic oligonucleotide"
gtgtattcgcagggggcgcgg

SEQ ID NO: 27924 - DNA, 21 bp, Artificial Sequence
  source: /note="Description of Artificial Sequence: Synthetic oligonucleotide"
gtgtatactgcggcgagggct

SEQ ID NO: 27925 - DNA, 21 bp, Artificial Sequence
  source: /note="Description of Artificial Sequence: Synthetic oligonucleotide"
gtttatactcagaattcgcct

SEQ ID NO: 27926 - DNA, 21 bp, Artificial Sequence
  source: /note="Description of Artificial Sequence: Synthetic oligonucleotide"
gtttatacttcgtcgatgcat

SEQ ID NO: 27927 - DNA, 21 bp, Artificial Sequence
  source: /note="Description of Artificial Sequence: Synthetic oligonucleotide"
gtgtattatggtaaggagccg

SEQ ID NO: 27928 - DNA, 21 bp, Artificial Sequence
  source: /note="Description of Artificial Sequence: Synthetic oligonucleotide"
tgggctgataagagtcatcct

SEQ ID NO: 27929 - DNA, 21 bp, Artificial Sequence
  source: /note="Description of Artificial Sequence: Synthetic oligonucleotide"
tgggctgataatagtgttaat

SEQ ID NO: 27930 - DNA, 21 bp, Artificial Sequence
  source: /note="Description of Artificial Sequence: Synthetic oligonucleotide"
tgggctgatacgactacgcgt

SEQ ID NO: 27931 - DNA, 21 bp, Artificial Sequence
  source: /note="Description of Artificial Sequence: Synthetic oligonucleotide"
tgggctggtgctatgcctatg

SEQ ID NO: 27932 - DNA, 21 bp, Artificial Sequence
  source: /note="Description of Artificial Sequence: Synthetic oligonucleotide"
tgggcgcataaggggttgcct

SEQ ID NO: 27933 - DNA, 21 bp, Artificial Sequence
  source: /note="Description of Artificial Sequence: Synthetic oligonucleotide"
tgggcgaagtcgcagcttgcg

SEQ ID NO: 27934 - DNA, 21 bp, Artificial Sequence
  source: /note="Description of Artificial Sequence: Synthetic oligonucleotide"
tgggcgccgcggtcgccgggg

SEQ ID NO: 27935 - DNA, 21 bp, Artificial Sequence
  source: /note="Description of Artificial Sequence: Synthetic oligonucleotide"
tgggcttctgctgagaggcag

SEQ ID NO: 27936 - DNA, 21 bp, Artificial Sequence
  source: /note="Description of Artificial Sequence: Synthetic oligonucleotide"
tgggcttcggggcatcaggct

SEQ ID NO: 27937 - DNA, 21 bp, Artificial Sequence
  source: /note="Description of Artificial Sequence: Synthetic oligonucleotide"
tgggcgagtcctattaggggt

SEQ ID NO: 27938 - DNA, 21 bp, Artificial Sequence
  source: /note="Description of Artificial Sequence: Synthetic oligonucleotide"
tgggcgactgagttgaggggg

SEQ ID NO: 27939 - DNA, 21 bp, Artificial Sequence
  source: /note="Description of Artificial Sequence: Synthetic oligonucleotide"
tgggctacgggttcgtcgcct

SEQ ID NO: 27940 - DNA, 21 bp, Artificial Sequence
  source: /note="Description of Artificial Sequence: Synthetic oligonucleotide"
tggtgtcagaggcctggtgct

SEQ ID NO: 27941 - DNA, 21 bp, Artificial Sequence
  source: /note="Description of Artificial Sequence: Synthetic oligonucleotide"
tgggatgctgctgttacgctg

SEQ ID NO: 27942 - DNA, 21 bp, Artificial Sequence
  source: /note="Description of Artificial Sequence: Synthetic oligonucleotide"
tgggatgcgttttcgacggat

SEQ ID NO: 27943 - DNA, 21 bp, Artificial Sequence
  source: /note="Description of Artificial Sequence: Synthetic oligonucleotide"
tgggatgcgcttgagcctgtt

SEQ ID NO: 27944 - DNA, 21 bp, Artificial Sequence
  source: /note="Description of Artificial Sequence: Synthetic oligonucleotide"
tgggatgctatgacggctcct

SEQ ID NO: 27945 - DNA, 21 bp, Artificial Sequence
  source: /note="Description of Artificial Sequence: Synthetic oligonucleotide"
tgggatgcgactgcgcctacg

SEQ ID NO: 27946 - DNA, 21 bp, Artificial Sequence
  source: /note="Description of Artificial Sequence: Synthetic oligonucleotide"
tgggatgatgggggtactcct

SEQ ID NO: 27947 - DNA, 21 bp, Artificial Sequence
  source: /note="Description of Artificial Sequence: Synthetic oligonucleotide"
tgggatattactaagactttt

SEQ ID NO: 27948 - DNA, 21 bp, Artificial Sequence
  source: /note="Description of Artificial Sequence: Synthetic oligonucleotide"
tgggataagaagcctacgatt

SEQ ID NO: 27949 - DNA, 21 bp, Artificial Sequence
  source: /note="Description of Artificial Sequence: Synthetic oligonucleotide"
tgggatcctgcgtatggtagt

SEQ ID NO: 27950 - DNA, 21 bp, Artificial Sequence
  source: /note="Description of Artificial Sequence: Synthetic oligonucleotide"
tgggatccgcggaattcgcag

SEQ ID NO: 27951 - DNA, 21 bp, Artificial Sequence
  source: /note="Description of Artificial Sequence: Synthetic oligonucleotide"
tgggatccgtctcgtactact

SEQ ID NO: 27952 - DNA, 21 bp, Artificial Sequence
  source: /note="Description of Artificial Sequence: Synthetic oligonucleotide"
tgggatcagcttgagcgggct

SEQ ID NO: 27953 - DNA, 21 bp, Artificial Sequence
  source: /note="Description of Artificial Sequence: Synthetic oligonucleotide"
tgggatcagcctcatcaggct

SEQ ID NO: 27954 - DNA, 21 bp, Artificial Sequence
  source: /note="Description of Artificial Sequence: Synthetic oligonucleotide"
tgggatagggatgcggcgctg

SEQ ID NO: 27955 - DNA, 21 bp, Artificial Sequence
  source: /note="Description of Artificial Sequence: Synthetic oligonucleotide"
tgggatagtgggtcgctgggt

SEQ ID NO: 27956 - DNA, 21 bp, Artificial Sequence
  source: /note="Description of Artificial Sequence: Synthetic oligonucleotide"
tgggattctcggcatcatgtg

SEQ ID NO: 27957 - DNA, 21 bp, Artificial Sequence
  source: /note="Description of Artificial Sequence: Synthetic oligonucleotide"
tgggatactcctggtcagtcg

SEQ ID NO: 27958 - DNA, 21 bp, Artificial Sequence
  source: /note="Description of Artificial Sequence: Synthetic oligonucleotide"
tgggatactcagtttagttct

SEQ ID NO: 27959 - DNA, 21 bp, Artificial Sequence
  source: /note="Description of Artificial Sequence: Synthetic oligonucleotide"
tgggaggctcattggacgcct

SEQ ID NO: 27960 - DNA, 21 bp, Artificial Sequence
  source: /note="Description of Artificial Sequence: Synthetic oligonucleotide"
tgggagggtgcgaatccggtg

SEQ ID NO: 27961 - DNA, 21 bp, Artificial Sequence
  source: /note="Description of Artificial Sequence: Synthetic oligonucleotide"
tgggaggggagtcatccttat

SEQ ID NO: 27962 - DNA, 21 bp, Artificial Sequence
  source: /note="Description of Artificial Sequence: Synthetic oligonucleotide"
tgggaggggtctaaggatttt

SEQ ID NO: 27963 - DNA, 21 bp, Artificial Sequence
  source: /note="Description of Artificial Sequence: Synthetic oligonucleotide"
tgggagatgactagggttgat

SEQ ID NO: 27964 - DNA, 21 bp, Artificial Sequence
  source: /note="Description of Artificial Sequence: Synthetic oligonucleotide"
tgggagcgttctaggtctgct

SEQ ID NO: 27965 - DNA, 21 bp, Artificial Sequence
  source: /note="Description of Artificial Sequence: Synthetic oligonucleotide"
tgggagagtggtgggggtttt

SEQ ID NO: 27966 - DNA, 21 bp, Artificial Sequence
  source: /note="Description of Artificial Sequence: Synthetic oligonucleotide"
tggtttgaggatcggttggat

SEQ ID NO: 27967 - DNA, 21 bp, Artificial Sequence
  source: /note="Description of Artificial Sequence: Synthetic oligonucleotide"
tggtttgagaagtgtaaggat

SEQ ID NO: 27968 - DNA, 21 bp, Artificial Sequence
  source: /note="Description of Artificial Sequence: Synthetic oligonucleotide"
tggtttccttcgggtcatgcg

SEQ ID NO: 27969 - DNA, 21 bp, Artificial Sequence
  source: /note="Description of Artificial Sequence: Synthetic oligonucleotide"
tggggggctgctctgactcct

SEQ ID NO: 27970 - DNA, 21 bp, Artificial Sequence
  source: /note="Description of Artificial Sequence: Synthetic oligonucleotide"
tggggggcgaggttggattcg

SEQ ID NO: 27971 - DNA, 21 bp, Artificial Sequence
  source: /note="Description of Artificial Sequence: Synthetic oligonucleotide"
tggggtgctagtcagacgagt

SEQ ID NO: 27972 - DNA, 21 bp, Artificial Sequence
  source: /note="Description of Artificial Sequence: Synthetic oligonucleotide"
tgggggggtacgagtccgggt

SEQ ID NO: 27973 - DNA, 21 bp, Artificial Sequence
  source: /note="Description of Artificial Sequence: Synthetic oligonucleotide"
tgggggcataataattcgccg

SEQ ID NO: 27974 - DNA, 21 bp, Artificial Sequence
  source: /note="Description of Artificial Sequence: Synthetic oligonucleotide"
tggggtcattcgtctggggtg

SEQ ID NO: 27975 - DNA, 21 bp, Artificial Sequence
  source: /note="Description of Artificial Sequence: Synthetic oligonucleotide"
tggggtctgttgcattctgct

SEQ ID NO: 27976 - DNA, 21 bp, Artificial Sequence
  source: /note="Description of Artificial Sequence: Synthetic oligonucleotide"
tgggggctggttactagtcct

SEQ ID NO: 27977 - DNA, 21 bp, Artificial Sequence
  source: /note="Description of Artificial Sequence: Synthetic oligonucleotide"
tgggggaatcagcagcctagg

SEQ ID NO: 27978 - DNA, 21 bp, Artificial Sequence
  source: /note="Description of Artificial Sequence: Synthetic oligonucleotide"
tgggggaattctcataatact

SEQ ID NO: 27979 - DNA, 21 bp, Artificial Sequence
  source: /note="Description of Artificial Sequence: Synthetic oligonucleotide"
tggggtcctactacgtctcat

SEQ ID NO: 27980 - DNA, 21 bp, Artificial Sequence
  source: /note="Description of Artificial Sequence: Synthetic oligonucleotide"
tgggggtctggggcggcgggt

SEQ ID NO: 27981 - DNA, 21 bp, Artificial Sequence
  source: /note="Description of Artificial Sequence: Synthetic oligonucleotide"
tgggggtctggggctgagact

SEQ ID NO: 27982 - DNA, 21 bp, Artificial Sequence
  source: /note="Description of Artificial Sequence: Synthetic oligonucleotide"
tgggggtcttcggggcagggt

SEQ ID NO: 27983 - DNA, 21 bp, Artificial Sequence
  source: /note="Description of Artificial Sequence: Synthetic oligonucleotide"
tggggtactcagctggcgatg

SEQ ID NO: 27984 - DNA, 21 bp, Artificial Sequence
  source: /note="Description of Artificial Sequence: Synthetic oligonucleotide"
tggggtacgtcggataagtct

SEQ ID NO: 27985 - DNA, 21 bp, Artificial Sequence
  source: /note="Description of Artificial Sequence: Synthetic oligonucleotide"
tgggggtatttgcatgttgcg

SEQ ID NO: 27986 - DNA, 21 bp, Artificial Sequence
  source: /note="Description of Artificial Sequence: Synthetic oligonucleotide"
tggcatgggactggtctgatt

SEQ ID NO: 27987 - DNA, 21 bp, Artificial Sequence
  source: /note="Description of Artificial Sequence: Synthetic oligonucleotide"
tggcataagtcgagtagtagt

SEQ ID NO: 27988 - DNA, 21 bp, Artificial Sequence
  source: /note="Description of Artificial Sequence: Synthetic oligonucleotide"
tggcatccttctggttcgcgt

SEQ ID NO: 27989 - DNA, 21 bp, Artificial Sequence
  source: /note="Description of Artificial Sequence: Synthetic oligonucleotide"
tggcataggactgcgcaggat

SEQ ID NO: 27990 - DNA, 21 bp, Artificial Sequence
  source: /note="Description of Artificial Sequence: Synthetic oligonucleotide"
tggcatagtgctaagcttgcg

SEQ ID NO: 27991 - DNA, 21 bp, Artificial Sequence
  source: /note="Description of Artificial Sequence: Synthetic oligonucleotide"
tggcatagtttgatggagccg

SEQ ID NO: 27992 - DNA, 21 bp, Artificial Sequence
  source: /note="Description of Artificial Sequence: Synthetic oligonucleotide"
tggcattctcggatgtatgag

SEQ ID NO: 27993 - DNA, 21 bp, Artificial Sequence
  source: /note="Description of Artificial Sequence: Synthetic oligonucleotide"
tggcatagttctgctactcag

SEQ ID NO: 27994 - DNA, 21 bp, Artificial Sequence
  source: /note="Description of Artificial Sequence: Synthetic oligonucleotide"
tggcattcgtcggatcttgtg

SEQ ID NO: 27995 - DNA, 21 bp, Artificial Sequence
  source: /note="Description of Artificial Sequence: Synthetic oligonucleotide"
tggattggtaatggggggccg

SEQ ID NO: 27996 - DNA, 21 bp, Artificial Sequence
  source: /note="Description of Artificial Sequence: Synthetic oligonucleotide"
tggattgggcagaatactgtg

SEQ ID NO: 27997 - DNA, 21 bp, Artificial Sequence
  source: /note="Description of Artificial Sequence: Synthetic oligonucleotide"
tggattaaggaggcttcgtct

SEQ ID NO: 27998 - DNA, 21 bp, Artificial Sequence
  source: /note="Description of Artificial Sequence: Synthetic oligonucleotide"
tggattcctggggctccgagt

SEQ ID NO: 27999 - DNA, 21 bp, Artificial Sequence
  source: /note="Description of Artificial Sequence: Synthetic oligonucleotide"
tggattccgcagcaggatgtt

SEQ ID NO: 28000 - DNA, 21 bp, Artificial Sequence
  source: /note="Description of Artificial Sequence: Synthetic oligonucleotide"
tggattccgtcgggtttgagt

SEQ ID NO: 28001 - DNA, 21 bp, Artificial Sequence
  source: /note="Description of Artificial Sequence: Synthetic oligonucleotide"
tggattactacggagccgttg

SEQ ID NO: 28002 - DNA, 21 bp, Artificial Sequence
  source: /note="Description of Artificial Sequence: Synthetic oligonucleotide"
tggaaggctaatttgccttct

SEQ ID NO: 28003 - DNA, 21 bp, Artificial Sequence
  source: /note="Description of Artificial Sequence: Synthetic oligonucleotide"
tggaaggatgagtgtcagacg

SEQ ID NO: 28004 - DNA, 21 bp, Artificial Sequence
  source: /note="Description of Artificial Sequence: Synthetic oligonucleotide"
tggaaggattcgcattatgag

SEQ ID NO: 28005 - DNA, 21 bp, Artificial Sequence
  source: /note="Description of Artificial Sequence: Synthetic oligonucleotide"
tggaaggagcatggtgctgcg

SEQ ID NO: 28006 - DNA, 21 bp, Artificial Sequence
  source: /note="Description of Artificial Sequence: Synthetic oligonucleotide"
tggaagcatagtactcagtct

SEQ ID NO: 28007 - DNA, 21 bp, Artificial Sequence
  source: /note="Description of Artificial Sequence: Synthetic oligonucleotide"
tggaagattatgattgcggag

SEQ ID NO: 28008 - DNA, 21 bp, Artificial Sequence
  source: /note="Description of Artificial Sequence: Synthetic oligonucleotide"
tggaagaagaatatggatttt

SEQ ID NO: 28009 - DNA, 21 bp, Artificial Sequence
  source: /note="Description of Artificial Sequence: Synthetic oligonucleotide"
tggaagttgaatagggatcag

SEQ ID NO: 28010 - DNA, 21 bp, Artificial Sequence
  source: /note="Description of Artificial Sequence: Synthetic oligonucleotide"
tggaagaatacttcttgtggt

SEQ ID NO: 28011 - DNA, 21 bp, Artificial Sequence
  source: /note="Description of Artificial Sequence: Synthetic oligonucleotide"
tggaagccggctgtgcctcag

SEQ ID NO: 28012 - DNA, 21 bp, Artificial Sequence
  source: /note="Description of Artificial Sequence: Synthetic oligonucleotide"
tggaagccggagattcttccg

SEQ ID NO: 28013 - DNA, 21 bp, Artificial Sequence
  source: /note="Description of Artificial Sequence: Synthetic oligonucleotide"
tggaagcctcctcttaatcct

SEQ ID NO: 28014 - DNA, 21 bp, Artificial Sequence
  source: /note="Description of Artificial Sequence: Synthetic oligonucleotide"
tggaagcaggggtcgactggt

SEQ ID NO: 28015 - DNA, 21 bp, Artificial Sequence
  source: /note="Description of Artificial Sequence: Synthetic oligonucleotide"
tggaagagtgattctgcgtcg

SEQ ID NO: 28016 - DNA, 21 bp, Artificial Sequence
  source: /note="Description of Artificial Sequence: Synthetic oligonucleotide"
tggaagtctaatacgttgacg

SEQ ID NO: 28017 - DNA, 21 bp, Artificial Sequence
  source: /note="Description of Artificial Sequence: Synthetic oligonucleotide"
tggaagtctcagattccgttg

SEQ ID NO: 28018 - DNA, 21 bp, Artificial Sequence
  source: /note="Description of Artificial Sequence: Synthetic oligonucleotide"
tggaagagtcagttgccgaat

SEQ ID NO: 28019 - DNA, 21 bp, Artificial Sequence
  source: /note="Description of Artificial Sequence: Synthetic oligonucleotide"
tggaagtctcagatgaatcct

SEQ ID NO: 28020 - DNA, 21 bp, Artificial Sequence
  source: /note="Description of Artificial Sequence: Synthetic oligonucleotide"
tggaagtcgactgatctgact

SEQ ID NO: 28021 - DNA, 21 bp, Artificial Sequence
  source: /note="Description of Artificial Sequence: Synthetic oligonucleotide"
tggaaggtttcgactgatacg

SEQ ID NO: 28022 - DNA, 21 bp, Artificial Sequence
  source: /note="Description of Artificial Sequence: Synthetic oligonucleotide"
tggctggctgatccgtctgat

SEQ ID NO: 28023 - DNA, 21 bp, Artificial Sequence
  source: /note="Description of Artificial Sequence: Synthetic oligonucleotide"
tggcttgagaattctcagagt

SEQ ID NO: 28024 - DNA, 21 bp, Artificial Sequence
  source: /note="Description of Artificial Sequence: Synthetic oligonucleotide"
tggcttgagtcggggactggt

SEQ ID NO: 28025 - DNA, 21 bp, Artificial Sequence
  source: /note="Description of Artificial Sequence: Synthetic oligonucleotide"
tggctgggtagggcggatgct

SEQ ID NO: 28026 - DNA, 21 bp, Artificial Sequence
  source: /note="Description of Artificial Sequence: Synthetic oligonucleotide"
tggcttcatgatactacttct

SEQ ID NO: 28027 - DNA, 21 bp, Artificial Sequence
  source: /note="Description of Artificial Sequence: Synthetic oligonucleotide"
tggctgcatgagcagcctaat

SEQ ID NO: 28028 - DNA, 21 bp, Artificial Sequence
  source: /note="Description of Artificial Sequence: Synthetic oligonucleotide"
tggcttcataggtcgaatgcg

SEQ ID NO: 28029 - DNA, 21 bp, Artificial Sequence
  source: /note="Description of Artificial Sequence: Synthetic oligonucleotide"
tggttgaagcagactgataat

SEQ ID NO: 28030 - DNA, 21 bp, Artificial Sequence
  source: /note="Description of Artificial Sequence: Synthetic oligonucleotide"
tggctgcttaatcaggaggag

SEQ ID NO: 28031 - DNA, 21 bp, Artificial Sequence
  source: /note="Description of Artificial Sequence: Synthetic oligonucleotide"
tggctgaatgatagtagtcgt

SEQ ID NO: 28032 - DNA, 21 bp, Artificial Sequence
  source: /note="Description of Artificial Sequence: Synthetic oligonucleotide"
tggcttccgaagttgccgcat

SEQ ID NO: 28033 - DNA, 21 bp, Artificial Sequence
  source: /note="Description of Artificial Sequence: Synthetic oligonucleotide"
tggcttcctacgcagactgag

SEQ ID NO: 28034 - DNA, 21 bp, Artificial Sequence
  source: /note="Description of Artificial Sequence: Synthetic oligonucleotide"
tggcttaggactcctgatgct

SEQ ID NO: 28035 - DNA, 21 bp, Artificial Sequence
  source: /note="Description of Artificial Sequence: Synthetic oligonucleotide"
tggctgacgtctttgaagatg

SEQ ID NO: 28036 - DNA, 21 bp, Artificial Sequence
  source: /note="Description of Artificial Sequence: Synthetic oligonucleotide"
tggctgacttcgcctaatgtg

SEQ ID NO: 28037 - DNA, 21 bp, Artificial Sequence
  source: /note="Description of Artificial Sequence: Synthetic oligonucleotide"
tggatggctatgaggcaggat

SEQ ID NO: 28038 - DNA, 21 bp, Artificial Sequence
  source: /note="Description of Artificial Sequence: Synthetic oligonucleotide"
tggatgcttcaggagacgtcg

SEQ ID NO: 28039 - DNA, 21 bp, Artificial Sequence
  source: /note="Description of Artificial Sequence: Synthetic oligonucleotide"
tggatgatggagtcgcgtcct

SEQ ID NO: 28040 - DNA, 21 bp, Artificial Sequence
  source: /note="Description of Artificial Sequence: Synthetic oligonucleotide"
tggatgcagtcggctaatcgg

SEQ ID NO: 28041 - DNA, 21 bp, Artificial Sequence
  source: /note="Description of Artificial Sequence: Synthetic oligonucleotide"
tggatgtcgcggttgccggcg

SEQ ID NO: 28042 - DNA, 21 bp, Artificial Sequence
  source: /note="Description of Artificial Sequence: Synthetic oligonucleotide"
tggaatgatgttacggctcgg

SEQ ID NO: 28043 - DNA, 21 bp, Artificial Sequence
  source: /note="Description of Artificial Sequence: Synthetic oligonucleotide"
tggaataagtctttgctgagt

SEQ ID NO: 28044 - DNA, 21 bp, Artificial Sequence
  source: /note="Description of Artificial Sequence: Synthetic oligonucleotide"
tggaataagacggagctggat

SEQ ID NO: 28045 - DNA, 21 bp, Artificial Sequence
  source: /note="Description of Artificial Sequence: Synthetic oligonucleotide"
tggaatttggagtctactacg

SEQ ID NO: 28046 - DNA, 21 bp, Artificial Sequence
  source: /note="Description of Artificial Sequence: Synthetic oligonucleotide"
tggaataatccggatcagctt

SEQ ID NO: 28047 - DNA, 21 bp, Artificial Sequence
  source: /note="Description of Artificial Sequence: Synthetic oligonucleotide"
tggaatcctcctctgccggct

SEQ ID NO: 28048 - DNA, 21 bp, Artificial Sequence
  source: /note="Description of Artificial Sequence: Synthetic oligonucleotide"
tggaatcctcgttcgagtgag

SEQ ID NO: 28049 - DNA, 21 bp, Artificial Sequence
  source: /note="Description of Artificial Sequence: Synthetic oligonucleotide"
tggaatactcagcagggtgtt

SEQ ID NO: 28050 - DNA, 21 bp, Artificial Sequence
  source: /note="Description of Artificial Sequence: Synthetic oligonucleotide"
tggaatacgacgctgcctatt

SEQ ID NO: 28051 - DNA, 21 bp, Artificial Sequence
  source: /note="Description of Artificial Sequence: Synthetic oligonucleotide"
tggaatacggtgacgattcgg

SEQ ID NO: 28052 - DNA, 21 bp, Artificial Sequence
  source: /note="Description of Artificial Sequence: Synthetic oligonucleotide"
tggccggctaagactgttgag

SEQ ID NO: 28053 - DNA, 21 bp, Artificial Sequence
  source: /note="Description of Artificial Sequence: Synthetic oligonucleotide"
tggcctgcgcaggtttcgagt

SEQ ID NO: 28054 - DNA, 21 bp, Artificial Sequence
  source: /note="Description of Artificial Sequence: Synthetic oligonucleotide"
tggccggcttcggttactgat

SEQ ID NO: 28055 - DNA, 21 bp, Artificial Sequence
  source: /note="Description of Artificial Sequence: Synthetic oligonucleotide"
tggcctgagaagaggctgacg

SEQ ID NO: 28056 - DNA, 21 bp, Artificial Sequence
  source: /note="Description of Artificial Sequence: Synthetic oligonucleotide"
tggcctgagtcttatagtact

SEQ ID NO: 28057 - DNA, 21 bp, Artificial Sequence
  source: /note="Description of Artificial Sequence: Synthetic oligonucleotide"
tggcctggtatgagtgcgggt

SEQ ID NO: 28058 - DNA, 21 bp, Artificial Sequence
  source: /note="Description of Artificial Sequence: Synthetic oligonucleotide"
tggcctggttcgagtcatgtg

SEQ ID NO: 28059 - DNA, 21 bp, Artificial Sequence
  source: /note="Description of Artificial Sequence: Synthetic oligonucleotide"
tggccgaatcttgtgagtggt

SEQ ID NO: 28060 - DNA, 21 bp, Artificial Sequence
  source: /note="Description of Artificial Sequence: Synthetic oligonucleotide"
tggccgcctgctagtacgctg

SEQ ID NO: 28061 - DNA, 21 bp, Artificial Sequence
  source: /note="Description of Artificial Sequence: Synthetic oligonucleotide"
tggcctcctgctgtttctagt

SEQ ID NO: 28062 - DNA, 21 bp, Artificial Sequence
  source: /note="Description of Artificial Sequence: Synthetic oligonucleotide"
tggcctcctagtgtgaatggt

SEQ ID NO: 28063 - DNA, 21 bp, Artificial Sequence
  source: /note="Description of Artificial Sequence: Synthetic oligonucleotide"
tggcctcagtctagtagtggg

SEQ ID NO: 28064 - DNA, 21 bp, Artificial Sequence
  source: /note="Description of Artificial Sequence: Synthetic oligonucleotide"
tggcctagtatggatgggagt

SEQ ID NO: 28065 - DNA, 21 bp, Artificial Sequence
  source: /note="Description of Artificial Sequence: Synthetic oligonucleotide"
tggccgtcgtcgattcagatt

SEQ ID NO: 28066 - DNA, 21 bp, Artificial Sequence
  source: /note="Description of Artificial Sequence: Synthetic oligonucleotide"
tggccgtcgtctactttgtct

SEQ ID NO: 28067 - DNA, 21 bp, Artificial Sequence
  source: /note="Description of Artificial Sequence: Synthetic oligonucleotide"
tggccgacgattattaatcgt

SEQ ID NO: 28068 - DNA, 21 bp, Artificial Sequence
  source: /note="Description of Artificial Sequence: Synthetic oligonucleotide"
tggcctactaagtctactcct

SEQ ID NO: 28069 - DNA, 21 bp, Artificial Sequence
  source: /note="Description of Artificial Sequence: Synthetic oligonucleotide"
tggcctacgaattcgaggccg

SEQ ID NO: 28070 - DNA, 21 bp, Artificial Sequence
  source: /note="Description of Artificial Sequence: Synthetic oligonucleotide"
tggcctactaatacgattcct

SEQ ID NO: 28071 - DNA, 21 bp, Artificial Sequence
  source: /note="Description of Artificial Sequence: Synthetic oligonucleotide"
tggcctgttcatcatgctgct

SEQ ID NO: 28072 - DNA, 21 bp, Artificial Sequence
  source: /note="Description of Artificial Sequence: Synthetic oligonucleotide"
tggcctgttacttcgtatggt

SEQ ID NO: 28073 - DNA, 21 bp, Artificial Sequence
  source: /note="Description of Artificial Sequence: Synthetic oligonucleotide"
tggccttatgatcctgggcgg

SEQ ID NO: 28074 - DNA, 21 bp, Artificial Sequence
  source: /note="Description of Artificial Sequence: Synthetic oligonucleotide"
tggcagggtcttacgcagggt

SEQ ID NO: 28075 - DNA, 21 bp, Artificial Sequence
  source: /note="Description of Artificial Sequence: Synthetic oligonucleotide"
tggcagctggctactcagcct

SEQ ID NO: 28076 - DNA, 21 bp, Artificial Sequence
  source: /note="Description of Artificial Sequence: Synthetic oligonucleotide"
tggcagatgttgcttagtgag

SEQ ID NO: 28077 - DNA, 21 bp, Artificial Sequence
  source: /note="Description of Artificial Sequence: Synthetic oligonucleotide"
tggcagcagctgtcggctagt

SEQ ID NO: 28078 - DNA, 21 bp, Artificial Sequence
  source: /note="Description of Artificial Sequence: Synthetic oligonucleotide"
tggcagcggtcgggtgatgtg

SEQ ID NO: 28079 - DNA, 21 bp, Artificial Sequence
  source: /note="Description of Artificial Sequence: Synthetic oligonucleotide"
tggcagagtcaggctactatg

SEQ ID NO: 28080 - DNA, 21 bp, Artificial Sequence
  source: /note="Description of Artificial Sequence: Synthetic oligonucleotide"
tggcagactcagagtaggtct

SEQ ID NO: 28081 - DNA, 21 bp, Artificial Sequence
  source: /note="Description of Artificial Sequence: Synthetic oligonucleotide"
tggcagtattcgcatgagcct

SEQ ID NO: 28082 - DNA, 21 bp, Artificial Sequence
  source: /note="Description of Artificial Sequence: Synthetic oligonucleotide"
tggcgggctatgttggaggag

SEQ ID NO: 28083 - DNA, 21 bp, Artificial Sequence
  source: /note="Description of Artificial Sequence: Synthetic oligonucleotide"
tggcgtgcgcctgggtctgct

SEQ ID NO: 28084 - DNA, 21 bp, Artificial Sequence
  source: /note="Description of Artificial Sequence: Synthetic oligonucleotide"
tggcgggatgctacttgttgt

SEQ ID NO: 28085 - DNA, 21 bp, Artificial Sequence
  source: /note="Description of Artificial Sequence: Synthetic oligonucleotide"
tggcgtgagcgttatgcggcg

SEQ ID NO: 28086 - DNA, 21 bp, Artificial Sequence
  source: /note="Description of Artificial Sequence: Synthetic oligonucleotide"
tggcgtggtctggatattgag

SEQ ID NO: 28087 - DNA, 21 bp, Artificial Sequence
  source: /note="Description of Artificial Sequence: Synthetic oligonucleotide"
tggcggcatgattataatttg

SEQ ID NO: 28088 - DNA, 21 bp, Artificial Sequence
  source: /note="Description of Artificial Sequence: Synthetic oligonucleotide"
tggcggcatactgaggcgatt

SEQ ID NO: 28089 - DNA, 21 bp, Artificial Sequence
  source: /note="Description of Artificial Sequence: Synthetic oligonucleotide"
tggcggattactgcggagtct

SEQ ID NO: 28090 - DNA, 21 bp, Artificial Sequence
  source: /note="Description of Artificial Sequence: Synthetic oligonucleotide"
tggcggcctttggtggagact

SEQ ID NO: 28091 - DNA, 21 bp, Artificial Sequence
  source: /note="Description of Artificial Sequence: Synthetic oligonucleotide"
tggcgtccgaatatggcggct

SEQ ID NO: 28092 - DNA, 21 bp, Artificial Sequence
  source: /note="Description of Artificial Sequence: Synthetic oligonucleotide"
tggcgtcctaatatgtctgtt

SEQ ID NO: 28093 - DNA, 21 bp, Artificial Sequence
  source: /note="Description of Artificial Sequence: Synthetic oligonucleotide"
tggcggccgcagcggcctgtg

SEQ ID NO: 28094 - DNA, 21 bp, Artificial Sequence
  source: /note="Description of Artificial Sequence: Synthetic oligonucleotide"
tggcggcaggagacgtctgtg

SEQ ID NO: 28095 - DNA, 21 bp, Artificial Sequence
  source: /note="Description of Artificial Sequence: Synthetic oligonucleotide"
tggaggcgtgatgcttcgcct

SEQ ID NO: 28096 - DNA, 21 bp, Artificial Sequence
  source: /note="Description of Artificial Sequence: Synthetic oligonucleotide"
tggcggtcggcgtcttcggcg

SEQ ID NO: 28097 - DNA, 21 bp, Artificial Sequence
  source: /note="Description of Artificial Sequence: Synthetic oligonucleotide"
tggcgttctcgggagattgct

SEQ ID NO: 28098 - DNA, 21 bp, Artificial Sequence
  source: /note="Description of Artificial Sequence: Synthetic oligonucleotide"
tggcggtcgtcggctgaggct

SEQ ID NO: 28099 - DNA, 21 bp, Artificial Sequence
  source: /note="Description of Artificial Sequence: Synthetic oligonucleotide"
tggtcggcggatccggatacg

SEQ ID NO: 28100 - DNA, 21 bp, Artificial Sequence
  source: /note="Description of Artificial Sequence: Synthetic oligonucleotide"
tggtcggcgtcttctcatcag

SEQ ID NO: 28101 - DNA, 21 bp, Artificial Sequence
  source: /note="Description of Artificial Sequence: Synthetic oligonucleotide"
tggtcggctgttggggaggtg

SEQ ID NO: 28102 - DNA, 21 bp, Artificial Sequence
  source: /note="Description of Artificial Sequence: Synthetic oligonucleotide"
tggagtgattctactgctgtt

SEQ ID NO: 28103 - DNA, 21 bp, Artificial Sequence
  source: /note="Description of Artificial Sequence: Synthetic oligonucleotide"
tggtctggtcatcctgtggct

SEQ ID NO: 28104 - DNA, 21 bp, Artificial Sequence
  source: /note="Description of Artificial Sequence: Synthetic oligonucleotide"
tggtcgggtaaggctaatgcg

SEQ ID NO: 28105 - DNA, 21 bp, Artificial Sequence
  source: /note="Description of Artificial Sequence: Synthetic oligonucleotide"
tggtctggtccgattagtctt

SEQ ID NO: 28106 - DNA, 21 bp, Artificial Sequence
  source: /note="Description of Artificial Sequence: Synthetic oligonucleotide"
tggtctcatgggcctatgccg

SEQ ID NO: 28107 - DNA, 21 bp, Artificial Sequence
  source: /note="Description of Artificial Sequence: Synthetic oligonucleotide"
tggtctcatgggtcgactacg

SEQ ID NO: 28108 - DNA, 21 bp, Artificial Sequence
  source: /note="Description of Artificial Sequence: Synthetic oligonucleotide"
tggtcgaaggttcctgatagg

SEQ ID NO: 28109 - DNA, 21 bp, Artificial Sequence
  source: /note="Description of Artificial Sequence: Synthetic oligonucleotide"
tggtctcttgttcatcgtgag

SEQ ID NO: 28110 - DNA, 21 bp, Artificial Sequence
  source: /note="Description of Artificial Sequence: Synthetic oligonucleotide"
tggagtaatcatgcgcatgct

SEQ ID NO: 28111 - DNA, 21 bp, Artificial Sequence
  source: /note="Description of Artificial Sequence: Synthetic oligonucleotide"
tggagtcctgcgagggagacg

SEQ ID NO: 28112 - DNA, 21 bp, Artificial Sequence
  source: /note="Description of Artificial Sequence: Synthetic oligonucleotide"
tggtctcctttgtatcatgcg

SEQ ID NO: 28113 - DNA, 21 bp, Artificial Sequence
  source: /note="Description of Artificial Sequence: Synthetic oligonucleotide"
tggagtccgaattcgactccg

SEQ ID NO: 28114 - DNA, 21 bp, Artificial Sequence
  source: /note="Description of Artificial Sequence: Synthetic oligonucleotide"
tggtcgcctaatgtgtgtcct

SEQ ID NO: 28115 - DNA, 21 bp, Artificial Sequence
  source: /note="Description of Artificial Sequence: Synthetic oligonucleotide"
tggtcgcctcggaatactctt

SEQ ID NO: 28116 - DNA, 21 bp, Artificial Sequence
  source: /note="Description of Artificial Sequence: Synthetic oligonucleotide"
tggtctccgagtgagggtaag

SEQ ID NO: 28117 - DNA, 21 bp, Artificial Sequence
  source: /note="Description of Artificial Sequence: Synthetic oligonucleotide"
tggtctccgagtcaggcttat

SEQ ID NO: 28118 - DNA, 21 bp, Artificial Sequence
  source: /note="Description of Artificial Sequence: Synthetic oligonucleotide"
tggtcgcctgttgttgtgcgg

SEQ ID NO: 28119 - DNA, 21 bp, Artificial Sequence
  source: /note="Description of Artificial Sequence: Synthetic oligonucleotide"
tggtctcgtgcggcggttgat

SEQ ID NO: 28120 - DNA, 21 bp, Artificial Sequence
  source: /note="Description of Artificial Sequence: Synthetic oligonucleotide"
tggagtaggccggctgctgat

SEQ ID NO: 28121 - DNA, 21 bp, Artificial Sequence
  source: /note="Description of Artificial Sequence: Synthetic oligonucleotide"
tggagtcggcaggatttgccg

SEQ ID NO: 28122 - DNA, 21 bp, Artificial Sequence
  source: /note="Description of Artificial Sequence: Synthetic oligonucleotide"
tggtcttctgcttatgtttct

SEQ ID NO: 28123 - DNA, 21 bp, Artificial Sequence
  source: /note="Description of Artificial Sequence: Synthetic oligonucleotide"
tggtcttctgatgctcctgag

SEQ ID NO: 28124 - DNA, 21 bp, Artificial Sequence
  source: /note="Description of Artificial Sequence: Synthetic oligonucleotide"
tggtcttctatgagtatgcat

SEQ ID NO: 28125 - DNA, 21 bp, Artificial Sequence
  source: /note="Description of Artificial Sequence: Synthetic oligonucleotide"
tggagtacgaagctggagggg

SEQ ID NO: 28126 - DNA, 21 bp, Artificial Sequence
  source: /note="Description of Artificial Sequence: Synthetic oligonucleotide"
tggtctactaatgcttatcag

SEQ ID NO: 28127 - DNA, 21 bp, Artificial Sequence
  source: /note="Description of Artificial Sequence: Synthetic oligonucleotide"
tggtctacttctactttgcat

SEQ ID NO: 28128 - DNA, 21 bp, Artificial Sequence
  source: /note="Description of Artificial Sequence: Synthetic oligonucleotide"
tggactgctccttctgatgtg

SEQ ID NO: 28129 - DNA, 21 bp, Artificial Sequence
  source: /note="Description of Artificial Sequence: Synthetic oligonucleotide"
tggactgctcagaatgttcag

SEQ ID NO: 28130 - DNA, 21 bp, Artificial Sequence
  source: /note="Description of Artificial Sequence: Synthetic oligonucleotide"
tggactgctagtagggcgtct

SEQ ID NO: 28131 - DNA, 21 bp, Artificial Sequence
  source: /note="Description of Artificial Sequence: Synthetic oligonucleotide"
tggactgagcgtgtgggtact

SEQ ID NO: 28132 - DNA, 21 bp, Artificial Sequence
  source: /note="Description of Artificial Sequence: Synthetic oligonucleotide"
tggactggttctgctcatcag

SEQ ID NO: 28133 - DNA, 21 bp, Artificial Sequence
  source: /note="Description of Artificial Sequence: Synthetic oligonucleotide"
tggacggggtatagtcagcag

SEQ ID NO: 28134 - DNA, 21 bp, Artificial Sequence
  source: /note="Description of Artificial Sequence: Synthetic oligonucleotide"
tggacgaattcgactcagcct

SEQ ID NO: 28135 - DNA, 21 bp, Artificial Sequence
  source: /note="Description of Artificial Sequence: Synthetic oligonucleotide"
tggacgcctcatagtcctatg

SEQ ID NO: 28136 - DNA, 21 bp, Artificial Sequence
  source: /note="Description of Artificial Sequence: Synthetic oligonucleotide"
tggactccgcgtgttatgcat

SEQ ID NO: 28137 - DNA, 21 bp, Artificial Sequence
  source: /note="Description of Artificial Sequence: Synthetic oligonucleotide"
tggacgcctagtatggctccg

SEQ ID NO: 28138 - DNA, 21 bp, Artificial Sequence
  source: /note="Description of Artificial Sequence: Synthetic oligonucleotide"
tggactccttctaataagcat

SEQ ID NO: 28139 - DNA, 21 bp, Artificial Sequence
  source: /note="Description of Artificial Sequence: Synthetic oligonucleotide"
tggactcgtttggagtctctg

SEQ ID NO: 28140 - DNA, 21 bp, Artificial Sequence
  source: /note="Description of Artificial Sequence: Synthetic oligonucleotide"
tggacgagtgatggtaattat

SEQ ID NO: 28141 - DNA, 21 bp, Artificial Sequence
  source: /note="Description of Artificial Sequence: Synthetic oligonucleotide"
tggacgtcgaagattgggccg

SEQ ID NO: 28142 - DNA, 21 bp, Artificial Sequence
  source: /note="Description of Artificial Sequence: Synthetic oligonucleotide"
tggacttcgagggatgcttct

SEQ ID NO: 28143 - DNA, 21 bp, Artificial Sequence
  source: /note="Description of Artificial Sequence: Synthetic oligonucleotide"
tggacttctagtggggggagt

SEQ ID NO: 28144 - DNA, 21 bp, Artificial Sequence
  source: /note="Description of Artificial Sequence: Synthetic oligonucleotide"
tggacgactaatacgggtggg

SEQ ID NO: 28145 - DNA, 21 bp, Artificial Sequence
  source: /note="Description of Artificial Sequence: Synthetic oligonucleotide"
tggactacgtcgggttcgatt

SEQ ID NO: 28146 - DNA, 21 bp, Artificial Sequence
  source: /note="Description of Artificial Sequence: Synthetic oligonucleotide"
tggactgttgatcttactcat

SEQ ID NO: 28147 - DNA, 21 bp, Artificial Sequence
  source: /note="Description of Artificial Sequence: Synthetic oligonucleotide"
tggactgtggagacttctcat

SEQ ID NO: 28148 - DNA, 21 bp, Artificial Sequence
  source: /note="Description of Artificial Sequence: Synthetic oligonucleotide"
tgggtgcattcttcggatagt

SEQ ID NO: 28149 - DNA, 21 bp, Artificial Sequence
  source: /note="Description of Artificial Sequence: Synthetic oligonucleotide"
tgggtgattcagaattgtaat

SEQ ID NO: 28150 - DNA, 21 bp, Artificial Sequence
  source: /note="Description of Artificial Sequence: Synthetic oligonucleotide"
tgggttcagtctggtactcct

SEQ ID NO: 28151 - DNA, 21 bp, Artificial Sequence
  source: /note="Description of Artificial Sequence: Synthetic oligonucleotide"
tgggtgacggggctgacggat

SEQ ID NO: 28152 - DNA, 21 bp, Artificial Sequence
  source: /note="Description of Artificial Sequence: Synthetic oligonucleotide"
tgggtgactcagcatccttct

SEQ ID NO: 28153 - DNA, 21 bp, Artificial Sequence
  source: /note="Description of Artificial Sequence: Synthetic oligonucleotide"
tatgctgctgcgccttctagg

SEQ ID NO: 28154 - DNA, 21 bp, Artificial Sequence
  source: /note="Description of Artificial Sequence: Synthetic oligonucleotide"
tatgctgctgcgtatgcttct

SEQ ID NO: 28155 - DNA, 21 bp, Artificial Sequence
  source: /note="Description of Artificial Sequence: Synthetic oligonucleotide"
tatgctgctcattataaggag

SEQ ID NO: 28156 - DNA, 21 bp, Artificial Sequence
  source: /note="Description of Artificial Sequence: Synthetic oligonucleotide"
tatgctgctaataggcagccg

SEQ ID NO: 28157 - DNA, 21 bp, Artificial Sequence
  source: /note="Description of Artificial Sequence: Synthetic oligonucleotide"
tatgctgcgccttcgtctgcg

SEQ ID NO: 28158 - DNA, 21 bp, Artificial Sequence
  source: /note="Description of Artificial Sequence: Synthetic oligonucleotide"
tatgctgcgtctcatgtttct

SEQ ID NO: 28159 - DNA, 21 bp, Artificial Sequence
  source: /note="Description of Artificial Sequence: Synthetic oligonucleotide"
tatgcggcttcgaatctgacg

SEQ ID NO: 28160 - DNA, 21 bp, Artificial Sequence
  source: /note="Description of Artificial Sequence: Synthetic oligonucleotide"
tatgcggcttcgtcggctacg

SEQ ID NO: 28161 - DNA, 21 bp, Artificial Sequence
  source: /note="Description of Artificial Sequence: Synthetic oligonucleotide"
tatgctgcggtgggtcttaat

SEQ ID NO: 28162 - DNA, 21 bp, Artificial Sequence
  source: /note="Description of Artificial Sequence: Synthetic oligonucleotide"
tatgcggctgttcggtcgaat

SEQ ID NO: 28163 - DNA, 21 bp, Artificial Sequence
  source: /note="Description of Artificial Sequence: Synthetic oligonucleotide"
tatgcggatcttccgagtcgt

SEQ ID NO: 28164 - DNA, 21 bp, Artificial Sequence
  source: /note="Description of Artificial Sequence: Synthetic oligonucleotide"
tatgcggatagtgctccgtat

SEQ ID NO: 28165 - DNA, 21 bp, Artificial Sequence
  source: /note="Description of Artificial Sequence: Synthetic oligonucleotide"
tatgcggagcggcaggggcgt

SEQ ID NO: 28166 - DNA, 21 bp, Artificial Sequence
  source: /note="Description of Artificial Sequence: Synthetic oligonucleotide"
tatgctgagtattcgaggaat

SEQ ID NO: 28167 - DNA, 21 bp, Artificial Sequence
  source: /note="Description of Artificial Sequence: Synthetic oligonucleotide"
tatgcgggtgctgcgttgggt

SEQ ID NO: 28168 - DNA, 21 bp, Artificial Sequence
  source: /note="Description of Artificial Sequence: Synthetic oligonucleotide"
tatgcgggggcgcagcgtagt

SEQ ID NO: 28169 - DNA, 21 bp, Artificial Sequence
  source: /note="Description of Artificial Sequence: Synthetic oligonucleotide"
tatgctggtggtaagctgatt

SEQ ID NO: 28170 - DNA, 21 bp, Artificial Sequence
  source: /note="Description of Artificial Sequence: Synthetic oligonucleotide"
tatgctggtaaggagcctgag

SEQ ID NO: 28171 - DNA, 21 bp, Artificial Sequence
  source: /note="Description of Artificial Sequence: Synthetic oligonucleotide"
tatgctgggccgaattctcct

SEQ ID NO: 28172 - DNA, 21 bp, Artificial Sequence
  source: /note="Description of Artificial Sequence: Synthetic oligonucleotide"
tatgctgggagtgaggttatg

SEQ ID NO: 28173 - DNA, 21 bp, Artificial Sequence
  source: /note="Description of Artificial Sequence: Synthetic oligonucleotide"
tatgctggtagtgtgacttct

SEQ ID NO: 28174 - DNA, 21 bp, Artificial Sequence
  source: /note="Description of Artificial Sequence: Synthetic oligonucleotide"
tatgctcatcagaagcctatg

SEQ ID NO: 28175 - DNA, 21 bp, Artificial Sequence
  source: /note="Description of Artificial Sequence: Synthetic oligonucleotide"
tatgctcatacgcgtgttgtg

SEQ ID NO: 28176 - DNA, 21 bp, Artificial Sequence
  source: /note="Description of Artificial Sequence: Synthetic oligonucleotide"
tatgctaagcctcttacttcg

SEQ ID NO: 28177 - DNA, 21 bp, Artificial Sequence
  source: /note="Description of Artificial Sequence: Synthetic oligonucleotide"
tatgcgcttgattcggcggag

SEQ ID NO: 28178 - DNA, 21 bp, Artificial Sequence
  source: /note="Description of Artificial Sequence: Synthetic oligonucleotide"
tatgcgcttgagcatcgtaat

SEQ ID NO: 28179 - DNA, 21 bp, Artificial Sequence
  source: /note="Description of Artificial Sequence: Synthetic oligonucleotide"
tatgcgttgcatcaggataag

SEQ ID NO: 28180 - DNA, 21 bp, Artificial Sequence
  source: /note="Description of Artificial Sequence: Synthetic oligonucleotide"
tatgcgcttcagtctaaggag

SEQ ID NO: 28181 - DNA, 21 bp, Artificial Sequence
  source: /note="Description of Artificial Sequence: Synthetic oligonucleotide"
tatgctctgtctggtagtact

SEQ ID NO: 28182 - DNA, 21 bp, Artificial Sequence
  source: /note="Description of Artificial Sequence: Synthetic oligonucleotide"
tatgctaatgctatgactctt

SEQ ID NO: 28183 - DNA, 21 bp, Artificial Sequence
  source: /note="Description of Artificial Sequence: Synthetic oligonucleotide"
tatgctaatgattctgggttg

SEQ ID NO: 28184 - DNA, 21 bp, Artificial Sequence
  source: /note="Description of Artificial Sequence: Synthetic oligonucleotide"
tatgcgaataatttgccgcat

SEQ ID NO: 28185 - DNA, 21 bp, Artificial Sequence
  source: /note="Description of Artificial Sequence: Synthetic oligonucleotide"
tatgcgaatactacgtcggcg

SEQ ID NO: 28186 - DNA, 21 bp, Artificial Sequence
  source: /note="Description of Artificial Sequence: Synthetic oligonucleotide"
tatgcgccgggtcttcggagt

SEQ ID NO: 28187 - DNA, 21 bp, Artificial Sequence
  source: /note="Description of Artificial Sequence: Synthetic oligonucleotide"
tatgcgcctcagagtgttgcg

SEQ ID NO: 28188 - DNA, 21 bp, Artificial Sequence
  source: /note="Description of Artificial Sequence: Synthetic oligonucleotide"
tatgctcaggcgtttcggaat

SEQ ID NO: 28189 - DNA, 21 bp, Artificial Sequence
  source: /note="Description of Artificial Sequence: Synthetic oligonucleotide"
tatgcgcagtattctgctgtg

SEQ ID NO: 28190 - DNA, 21 bp, Artificial Sequence
  source: /note="Description of Artificial Sequence: Synthetic oligonucleotide"
tatgctcgggaggctcatgcg

SEQ ID NO: 28191 - DNA, 21 bp, Artificial Sequence
  source: /note="Description of Artificial Sequence: Synthetic oligonucleotide"
tatgctcgggagactttgcat

SEQ ID NO: 28192 - DNA, 21 bp, Artificial Sequence
  source: /note="Description of Artificial Sequence: Synthetic oligonucleotide"
tatgcgaggttgactgggcct

SEQ ID NO: 28193 - DNA, 21 bp, Artificial Sequence
  source: /note="Description of Artificial Sequence: Synthetic oligonucleotide"
tatgcgcggcagattactgct

SEQ ID NO: 28194 - DNA, 21 bp, Artificial Sequence
  source: /note="Description of Artificial Sequence: Synthetic oligonucleotide"
tatgctcggcagcctgctgtg

SEQ ID NO: 28195 - DNA, 21 bp, Artificial Sequence
  source: /note="Description of Artificial Sequence: Synthetic oligonucleotide"
tatgcgtcggcttctcatcct

SEQ ID NO: 28196 - DNA, 21 bp, Artificial Sequence
  source: /note="Description of Artificial Sequence: Synthetic oligonucleotide"
tatgctagtcttaagggtgct

SEQ ID NO: 28197 - DNA, 21 bp, Artificial Sequence
  source: /note="Description of Artificial Sequence: Synthetic oligonucleotide"
tatgcgtcgcctgggcggact

SEQ ID NO: 28198 - DNA, 21 bp, Artificial Sequence
  source: /note="Description of Artificial Sequence: Synthetic oligonucleotide"
tatgcttcttctgcggcgctt

SEQ ID NO: 28199 - DNA, 21 bp, Artificial Sequence
  source: /note="Description of Artificial Sequence: Synthetic oligonucleotide"
tatgcgtcgtcgagtactcgg

SEQ ID NO: 28200 - DNA, 21 bp, Artificial Sequence
  source: /note="Description of Artificial Sequence: Synthetic oligonucleotide"
tatgctactgagtctgggaat

SEQ ID NO: 28201 - DNA, 21 bp, Artificial Sequence
  source: /note="Description of Artificial Sequence: Synthetic oligonucleotide"
tatgctacttttgcgccggct

SEQ ID NO: 28202 - DNA, 21 bp, Artificial Sequence
  source: /note="Description of Artificial Sequence: Synthetic oligonucleotide"
tatgctacgcatgagccggat

SEQ ID NO: 28203 - DNA, 21 bp, Artificial Sequence
  source: /note="Description of Artificial Sequence: Synthetic oligonucleotide"
tatgctactccgagtcatcat

SEQ ID NO: 28204 - DNA, 21 bp, Artificial Sequence
  source: /note="Description of Artificial Sequence: Synthetic oligonucleotide"
tatgcgacgactgtgttgact

SEQ ID NO: 28205 - DNA, 21 bp, Artificial Sequence
  source: /note="Description of Artificial Sequence: Synthetic oligonucleotide"
tatgctactgtgattggtctg

SEQ ID NO: 28206 - DNA, 21 bp, Artificial Sequence
  source: /note="Description of Artificial Sequence: Synthetic oligonucleotide"
tatgctgttgaggcttcgcgg

SEQ ID NO: 28207 - DNA, 21 bp, Artificial Sequence
  source: /note="Description of Artificial Sequence: Synthetic oligonucleotide"
tatgcggtggagggtaagaat

SEQ ID NO: 28208 - DNA, 21 bp, Artificial Sequence
  source: /note="Description of Artificial Sequence: Synthetic oligonucleotide"
tatgctgtttctaggcctctt

SEQ ID NO: 28209 - DNA, 21 bp, Artificial Sequence
  source: /note="Description of Artificial Sequence: Synthetic oligonucleotide"
tatgcgtatgagggttttgct

SEQ ID NO: 28210 - DNA, 21 bp, Artificial Sequence
  source: /note="Description of Artificial Sequence: Synthetic oligonucleotide"
tatgcttatgagcgtcagatt

SEQ ID NO: 28211 - DNA, 21 bp, Artificial Sequence
  source: /note="Description of Artificial Sequence: Synthetic oligonucleotide"
tattgtgagagttttcctgat

SEQ ID NO: 28212 - DNA, 21 bp, Artificial Sequence
  source: /note="Description of Artificial Sequence: Synthetic oligonucleotide"
tattgttctcatcagagtgtg

SEQ ID NO: 28213 - DNA, 21 bp, Artificial Sequence
  source: /note="Description of Artificial Sequence: Synthetic oligonucleotide"
tattgtactgggaatgatgct

SEQ ID NO: 28214 - DNA, 21 bp, Artificial Sequence
  source: /note="Description of Artificial Sequence: Synthetic oligonucleotide"
tatgatgcgattagtaatccg

SEQ ID NO: 28215 - DNA, 21 bp, Artificial Sequence
  source: /note="Description of Artificial Sequence: Synthetic oligonucleotide"
tatgatcatgttattgctacg

SEQ ID NO: 28216 - DNA, 21 bp, Artificial Sequence
  source: /note="Description of Artificial Sequence: Synthetic oligonucleotide"
tatgataaggcgatgagtccg

SEQ ID NO: 28217 - DNA, 21 bp, Artificial Sequence
  source: /note="Description of Artificial Sequence: Synthetic oligonucleotide"
tatgatcttggggttacgact

SEQ ID NO: 28218 - DNA, 21 bp, Artificial Sequence
  source: /note="Description of Artificial Sequence: Synthetic oligonucleotide"
tatgatatggggccggttcct

SEQ ID NO: 28219 - DNA, 21 bp, Artificial Sequence
  source: /note="Description of Artificial Sequence: Synthetic oligonucleotide"
tatgataataagacgcggctg

SEQ ID NO: 28220 - DNA, 21 bp, Artificial Sequence
  source: /note="Description of Artificial Sequence: Synthetic oligonucleotide"
tatgataatatgcattgtaag

SEQ ID NO: 28221 - DNA, 21 bp, Artificial Sequence
  source: /note="Description of Artificial Sequence: Synthetic oligonucleotide"
tatgataatcagttgaataat

SEQ ID NO: 28222 - DNA, 21 bp, Artificial Sequence
  source: /note="Description of Artificial Sequence: Synthetic oligonucleotide"
tatgatccgtatcattctcct

SEQ ID NO: 28223 - DNA, 21 bp, Artificial Sequence
  source: /note="Description of Artificial Sequence: Synthetic oligonucleotide"
tatgatagggagccgcttgat

SEQ ID NO: 28224 - DNA, 21 bp, Artificial Sequence
  source: /note="Description of Artificial Sequence: Synthetic oligonucleotide"
tatgattctaatacggagacg

SEQ ID NO: 28225 - DNA, 21 bp, Artificial Sequence
  source: /note="Description of Artificial Sequence: Synthetic oligonucleotide"
tatgattctcgtgggccggct

SEQ ID NO: 28226 - DNA, 21 bp, Artificial Sequence
  source: /note="Description of Artificial Sequence: Synthetic oligonucleotide"
tatgattcgagtgtgcctaat

SEQ ID NO: 28227 - DNA, 21 bp, Artificial Sequence
  source: /note="Description of Artificial Sequence: Synthetic oligonucleotide"
tatgattcggttgctactttg

SEQ ID NO: 28228 - DNA, 21 bp, Artificial Sequence
  source: /note="Description of Artificial Sequence: Synthetic oligonucleotide"
tatgatacgcatggttctccg

SEQ ID NO: 28229 - DNA, 21 bp, Artificial Sequence
  source: /note="Description of Artificial Sequence: Synthetic oligonucleotide"
tatgatactaagctgcagatg

SEQ ID NO: 28230 - DNA, 21 bp, Artificial Sequence
  source: /note="Description of Artificial Sequence: Synthetic oligonucleotide"
tatgaggcgccgacgcggtct

SEQ ID NO: 28231 - DNA, 21 bp, Artificial Sequence
  source: /note="Description of Artificial Sequence: Synthetic oligonucleotide"
tatgaggcgacgtcgagtaat

SEQ ID NO: 28232 - DNA, 21 bp, Artificial Sequence
  source: /note="Description of Artificial Sequence: Synthetic oligonucleotide"
tatgagggttcgcctcgtaat

SEQ ID NO: 28233 - DNA, 21 bp, Artificial Sequence
  source: /note="Description of Artificial Sequence: Synthetic oligonucleotide"
tatgaggggtataagcttcct

SEQ ID NO: 28234 - DNA, 21 bp, Artificial Sequence
  source: /note="Description of Artificial Sequence: Synthetic oligonucleotide"
tatgagattcaggggactggt

SEQ ID NO: 28235 - DNA, 21 bp, Artificial Sequence
  source: /note="Description of Artificial Sequence: Synthetic oligonucleotide"
tatgagcttgctcatcatgct

SEQ ID NO: 28236 - DNA, 21 bp, Artificial Sequence
  source: /note="Description of Artificial Sequence: Synthetic oligonucleotide"
tatgagttgcagctgttttcg

SEQ ID NO: 28237 - DNA, 21 bp, Artificial Sequence
  source: /note="Description of Artificial Sequence: Synthetic oligonucleotide"
tatgagttgcggaggattccg

SEQ ID NO: 28238 - DNA, 21 bp, Artificial Sequence
  source: /note="Description of Artificial Sequence: Synthetic oligonucleotide"
tatgagccggggactgatgcg

SEQ ID NO: 28239 - DNA, 21 bp, Artificial Sequence
  source: /note="Description of Artificial Sequence: Synthetic oligonucleotide"
tatgagcctaaggtgcgtgtg

SEQ ID NO: 28240 - DNA, 21 bp, Artificial Sequence
  source: /note="Description of Artificial Sequence: Synthetic oligonucleotide"
tatgagtcgtcgaatgatcct

SEQ ID NO: 28241 - DNA, 21 bp, Artificial Sequence
  source: /note="Description of Artificial Sequence: Synthetic oligonucleotide"
tatgagtcttatattgagcgg

SEQ ID NO: 28242 - DNA, 21 bp, Artificial Sequence
  source: /note="Description of Artificial Sequence: Synthetic oligonucleotide"
tatgagactgcttttcgggcg

SEQ ID NO: 28243 - DNA, 21 bp, Artificial Sequence
  source: /note="Description of Artificial Sequence: Synthetic oligonucleotide"
tatgagactgatattagtcag

SEQ ID NO: 28244 - DNA, 21 bp, Artificial Sequence
  source: /note="Description of Artificial Sequence: Synthetic oligonucleotide"
tatgagactgagcttcgggct

SEQ ID NO: 28245 - DNA, 21 bp, Artificial Sequence
  source: /note="Description of Artificial Sequence: Synthetic oligonucleotide"
tattttgcgggtcggactgat

SEQ ID NO: 28246 - DNA, 21 bp, Artificial Sequence
  source: /note="Description of Artificial Sequence: Synthetic oligonucleotide"
tattttgctagtcctacttcg

SEQ ID NO: 28247 - DNA, 21 bp, Artificial Sequence
  source: /note="Description of Artificial Sequence: Synthetic oligonucleotide"
tattttgaggcttcttcggcg

SEQ ID NO: 28248 - DNA, 21 bp, Artificial Sequence
  source: /note="Description of Artificial Sequence: Synthetic oligonucleotide"
tattttggttcttcggctacg

SEQ ID NO: 28249 - DNA, 21 bp, Artificial Sequence
  source: /note="Description of Artificial Sequence: Synthetic oligonucleotide"
tattttggttcgtctgatccg

SEQ ID NO: 28250 - DNA, 21 bp, Artificial Sequence
  source: /note="Description of Artificial Sequence: Synthetic oligonucleotide"
tattttcatctggcgacttcg

SEQ ID NO: 28251 - DNA, 21 bp, Artificial Sequence
  source: /note="Description of Artificial Sequence: Synthetic oligonucleotide"
tattttccgtcgatggtggat

SEQ ID NO: 28252 - DNA, 21 bp, Artificial Sequence
  source: /note="Description of Artificial Sequence: Synthetic oligonucleotide"
tatttttcgcatgatgagact

SEQ ID NO: 28253 - DNA, 21 bp, Artificial Sequence
  source: /note="Description of Artificial Sequence: Synthetic oligonucleotide"
tattttactaatgatagtgtg

SEQ ID NO: 28254 - DNA, 21 bp, Artificial Sequence
  source: /note="Description of Artificial Sequence: Synthetic oligonucleotide"
tattttactagtcgtagtgag

SEQ ID NO: 28255 - DNA, 21 bp, Artificial Sequence
  source: /note="Description of Artificial Sequence: Synthetic oligonucleotide"
tattttgtggctaataatcct

SEQ ID NO: 28256 - DNA, 21 bp, Artificial Sequence
  source: /note="Description of Artificial Sequence: Synthetic oligonucleotide"
tattttgttaagattcttatt

SEQ ID NO: 28257 - DNA, 21 bp, Artificial Sequence
  source: /note="Description of Artificial Sequence: Synthetic oligonucleotide"
tatggtgcgagtccggatacg

SEQ ID NO: 28258 - DNA, 21 bp, Artificial Sequence
  source: /note="Description of Artificial Sequence: Synthetic oligonucleotide"
tatggtgcggtggcgaagcat

SEQ ID NO: 28259 - DNA, 21 bp, Artificial Sequence
  source: /note="Description of Artificial Sequence: Synthetic oligonucleotide"
tatggtgctgtgcgtcataat

SEQ ID NO: 28260 - DNA, 21 bp, Artificial Sequence
  source: /note="Description of Artificial Sequence: Synthetic oligonucleotide"
tatggtgctgtgagtccggtg

SEQ ID NO: 28261 - DNA, 21 bp, Artificial Sequence
  source: /note="Description of Artificial Sequence: Synthetic oligonucleotide"
tatggtgatcctgggccgcct

SEQ ID NO: 28262 - DNA, 21 bp, Artificial Sequence
  source: /note="Description of Artificial Sequence: Synthetic oligonucleotide"
tatggtgatgttgctgatagt

SEQ ID NO: 28263 - DNA, 21 bp, Artificial Sequence
  source: /note="Description of Artificial Sequence: Synthetic oligonucleotide"
tatggggagccgattcgtccg

SEQ ID NO: 28264 - DNA, 21 bp, Artificial Sequence
  source: /note="Description of Artificial Sequence: Synthetic oligonucleotide"
tatgggggtgctgggagtttg

SEQ ID NO: 28265 - DNA, 21 bp, Artificial Sequence
  source: /note="Description of Artificial Sequence: Synthetic oligonucleotide"
tatgggggtcatactgttagt

SEQ ID NO: 28266 - DNA, 21 bp, Artificial Sequence
  source: /note="Description of Artificial Sequence: Synthetic oligonucleotide"
tatggtgggcctaatatgact

SEQ ID NO: 28267 - DNA, 21 bp, Artificial Sequence
  source: /note="Description of Artificial Sequence: Synthetic oligonucleotide"
tatgggatttcgccgaagacg

SEQ ID NO: 28268 - DNA, 21 bp, Artificial Sequence
  source: /note="Description of Artificial Sequence: Synthetic oligonucleotide"
tatggtaagatgacgagtgat

SEQ ID NO: 28269 - DNA, 21 bp, Artificial Sequence
  source: /note="Description of Artificial Sequence: Synthetic oligonucleotide"
tatgggctgaagtcggcgatt

SEQ ID NO: 28270 - DNA, 21 bp, Artificial Sequence
  source: /note="Description of Artificial Sequence: Synthetic oligonucleotide"
tatgggctgtcggcgcattcg

SEQ ID NO: 28271 - DNA, 21 bp, Artificial Sequence
  source: /note="Description of Artificial Sequence: Synthetic oligonucleotide"
tatggtatgaaggtggctcag

SEQ ID NO: 28272 - DNA, 21 bp, Artificial Sequence
  source: /note="Description of Artificial Sequence: Synthetic oligonucleotide"
tatgggatgtcgtttaaggag

SEQ ID NO: 28273 - DNA, 21 bp, Artificial Sequence
  source: /note="Description of Artificial Sequence: Synthetic oligonucleotide"
tatggtaatgctcgtgcggtt

SEQ ID NO: 28274 - DNA, 21 bp, Artificial Sequence
  source: /note="Description of Artificial Sequence: Synthetic oligonucleotide"
tatgggaatgggagtcttggt

SEQ ID NO: 28275 - DNA, 21 bp, Artificial Sequence
  source: /note="Description of Artificial Sequence: Synthetic oligonucleotide"
tatggtaatcatcttttgtct

SEQ ID NO: 28276 - DNA, 21 bp, Artificial Sequence
  source: /note="Description of Artificial Sequence: Synthetic oligonucleotide"
tatgggcctgcgttgcttagt

SEQ ID NO: 28277 - DNA, 21 bp, Artificial Sequence
  source: /note="Description of Artificial Sequence: Synthetic oligonucleotide"
tatggtcctgatcttcgtcag

SEQ ID NO: 28278 - DNA, 21 bp, Artificial Sequence
  source: /note="Description of Artificial Sequence: Synthetic oligonucleotide"
tatggtccgcatgcgaagagt

SEQ ID NO: 28279 - DNA, 21 bp, Artificial Sequence
  source: /note="Description of Artificial Sequence: Synthetic oligonucleotide"
tatgggcagagtggggcttct

SEQ ID NO: 28280 - DNA, 21 bp, Artificial Sequence
  source: /note="Description of Artificial Sequence: Synthetic oligonucleotide"
tatggtcagtctaagagtagt

SEQ ID NO: 28281 - DNA, 21 bp, Artificial Sequence
  source: /note="Description of Artificial Sequence: Synthetic oligonucleotide"
tatggtcgtaatatgacgcag

SEQ ID NO: 28282 - DNA, 21 bp, Artificial Sequence
  source: /note="Description of Artificial Sequence: Synthetic oligonucleotide"
tatgggcggtctcagtcgctg

SEQ ID NO: 28283 - DNA, 21 bp, Artificial Sequence
  source: /note="Description of Artificial Sequence: Synthetic oligonucleotide"
tatggttcgttgaatattgct

SEQ ID NO: 28284 - DNA, 21 bp, Artificial Sequence
  source: /note="Description of Artificial Sequence: Synthetic oligonucleotide"
tatggttcgcctcgtgtgacg

SEQ ID NO: 28285 - DNA, 21 bp, Artificial Sequence
  source: /note="Description of Artificial Sequence: Synthetic oligonucleotide"
tatgggtcttcgtgtcatacg

SEQ ID NO: 28286 - DNA, 21 bp, Artificial Sequence
  source: /note="Description of Artificial Sequence: Synthetic oligonucleotide"
tatggttcttcgcgtacgacg

SEQ ID NO: 28287 - DNA, 21 bp, Artificial Sequence
  source: /note="Description of Artificial Sequence: Synthetic oligonucleotide"
tatggtactgcgactcaggcg

SEQ ID NO: 28288 - DNA, 21 bp, Artificial Sequence
  source: /note="Description of Artificial Sequence: Synthetic oligonucleotide"
tatggtacggagactaattat

SEQ ID NO: 28289 - DNA, 21 bp, Artificial Sequence
  source: /note="Description of Artificial Sequence: Synthetic oligonucleotide"
tatgggacgggtgggcatctg

SEQ ID NO: 28290 - DNA, 21 bp, Artificial Sequence
  source: /note="Description of Artificial Sequence: Synthetic oligonucleotide"
tatggtacgcttgctcggcat

SEQ ID NO: 28291 - DNA, 21 bp, Artificial Sequence
  source: /note="Description of Artificial Sequence: Synthetic oligonucleotide"
tatggggttcgtccgagtacg

SEQ ID NO: 28292 - DNA, 21 bp, Artificial Sequence
  source: /note="Description of Artificial Sequence: Synthetic oligonucleotide"
tatggttatgctgctttgaat

SEQ ID NO: 28293 - DNA, 21 bp, Artificial Sequence
  source: /note="Description of Artificial Sequence: Synthetic oligonucleotide"
tatcatgcggggcctccggat

SEQ ID NO: 28294 - DNA, 21 bp, Artificial Sequence
  source: /note="Description of Artificial Sequence: Synthetic oligonucleotide"
tatcatgggaggactgtggtt

SEQ ID NO: 28295 - DNA, 21 bp, Artificial Sequence
  source: /note="Description of Artificial Sequence: Synthetic oligonucleotide"
tatcataagacgggggttcat

SEQ ID NO: 28296 - DNA, 21 bp, Artificial Sequence
  source: /note="Description of Artificial Sequence: Synthetic oligonucleotide"
tatcatatgacggttaagtct

SEQ ID NO: 28297 - DNA, 21 bp, Artificial Sequence
  source: /note="Description of Artificial Sequence: Synthetic oligonucleotide"
tatcataatcatggtactagt

SEQ ID NO: 28298 - DNA, 21 bp, Artificial Sequence
  source: /note="Description of Artificial Sequence: Synthetic oligonucleotide"
tatcataatctgcagggtatg

SEQ ID NO: 28299 - DNA, 21 bp, Artificial Sequence
  source: /note="Description of Artificial Sequence: Synthetic oligonucleotide"
tatcataataattcgtcgcct

SEQ ID NO: 28300 - DNA, 21 bp, Artificial Sequence
  source: /note="Description of Artificial Sequence: Synthetic oligonucleotide"
tatcatcctcctcgtgagaat

SEQ ID NO: 28301 - DNA, 21 bp, Artificial Sequence
  source: /note="Description of Artificial Sequence: Synthetic oligonucleotide"
tatcatcctgtgattgcgcct

SEQ ID NO: 28302 - DNA, 21 bp, Artificial Sequence
  source: /note="Description of Artificial Sequence: Synthetic oligonucleotide"
tatcatagtgaggttcgtgct

SEQ ID NO: 28303 - DNA, 21 bp, Artificial Sequence
  source: /note="Description of Artificial Sequence: Synthetic oligonucleotide"
tatcatagtaatacgacttcg

SEQ ID NO: 28304 - DNA, 21 bp, Artificial Sequence
  source: /note="Description of Artificial Sequence: Synthetic oligonucleotide"
tatcatagtgtttctacgagt

SEQ ID NO: 28305 - DNA, 21 bp, Artificial Sequence
  source: /note="Description of Artificial Sequence: Synthetic oligonucleotide"
tatcatactgcgtcgatgaat

SEQ ID NO: 28306 - DNA, 21 bp, Artificial Sequence
  source: /note="Description of Artificial Sequence: Synthetic oligonucleotide"
tatcatactttgaataaggat

SEQ ID NO: 28307 - DNA, 21 bp, Artificial Sequence
  source: /note="Description of Artificial Sequence: Synthetic oligonucleotide"
tatcatactgtttctagtaat

SEQ ID NO: 28308 - DNA, 21 bp, Artificial Sequence
  source: /note="Description of Artificial Sequence: Synthetic oligonucleotide"
tatcatgtgagggcggcgtct

SEQ ID NO: 28309 - DNA, 21 bp, Artificial Sequence
  source: /note="Description of Artificial Sequence: Synthetic oligonucleotide"
tatattgagactcgtgttacg

SEQ ID NO: 28310 - DNA, 21 bp, Artificial Sequence
  source: /note="Description of Artificial Sequence: Synthetic oligonucleotide"
tatattggtgagcgggatcct

SEQ ID NO: 28311 - DNA, 21 bp, Artificial Sequence
  source: /note="Description of Artificial Sequence: Synthetic oligonucleotide"
tatattggtccggatctggct

SEQ ID NO: 28312 - DNA, 21 bp, Artificial Sequence
  source: /note="Description of Artificial Sequence: Synthetic oligonucleotide"
tatattcatccggagcaggag

SEQ ID NO: 28313 - DNA, 21 bp, Artificial Sequence
  source: /note="Description of Artificial Sequence: Synthetic oligonucleotide"
tatattattgctcaggagtgt

SEQ ID NO: 28314 - DNA, 21 bp, Artificial Sequence
  source: /note="Description of Artificial Sequence: Synthetic oligonucleotide"
tatattcttacttctgagact

SEQ ID NO: 28315 - DNA, 21 bp, Artificial Sequence
  source: /note="Description of Artificial Sequence: Synthetic oligonucleotide"
tatattaatgctcttattgcg

SEQ ID NO: 28316 - DNA, 21 bp, Artificial Sequence
  source: /note="Description of Artificial Sequence: Synthetic oligonucleotide"
tatattccgtcgaagtttact

SEQ ID NO: 28317 - DNA, 21 bp, Artificial Sequence
  source: /note="Description of Artificial Sequence: Synthetic oligonucleotide"
tatattcaggttcctaagggg

SEQ ID NO: 28318 - DNA, 21 bp, Artificial Sequence
  source: /note="Description of Artificial Sequence: Synthetic oligonucleotide"
tatatttctgcggggacttcg

SEQ ID NO: 28319 - DNA, 21 bp, Artificial Sequence
  source: /note="Description of Artificial Sequence: Synthetic oligonucleotide"
tatatttcgccggtttctgtg

SEQ ID NO: 28320 - DNA, 21 bp, Artificial Sequence
  source: /note="Description of Artificial Sequence: Synthetic oligonucleotide"
tataaggctgcttcggttcct

SEQ ID NO: 28321 - DNA, 21 bp, Artificial Sequence
  source: /note="Description of Artificial Sequence: Synthetic oligonucleotide"
tataagggtgctcctgttact

SEQ ID NO: 28322 - DNA, 21 bp, Artificial Sequence
  source: /note="Description of Artificial Sequence: Synthetic oligonucleotide"
tataagggtgcttcgctggat

SEQ ID NO: 28323 - DNA, 21 bp, Artificial Sequence
  source: /note="Description of Artificial Sequence: Synthetic oligonucleotide"
tataagggtggtaattcgttt

SEQ ID NO: 28324 - DNA, 21 bp, Artificial Sequence
  source: /note="Description of Artificial Sequence: Synthetic oligonucleotide"
tataagttgaatgcgacgtat

SEQ ID NO: 28325 - DNA, 21 bp, Artificial Sequence
  source: /note="Description of Artificial Sequence: Synthetic oligonucleotide"
tataagcttcagcaggtgtcg

SEQ ID NO: 28326 - DNA, 21 bp, Artificial Sequence
  source: /note="Description of Artificial Sequence: Synthetic oligonucleotide"
tataagccggcgaatgtgaat

SEQ ID NO: 28327 - DNA, 21 bp, Artificial Sequence
  source: /note="Description of Artificial Sequence: Synthetic oligonucleotide"
tataagccgagtgaggggacg

SEQ ID NO: 28328 - DNA, 21 bp, Artificial Sequence
  source: /note="Description of Artificial Sequence: Synthetic oligonucleotide"
tataagcagcatgtgatttcg

SEQ ID NO: 28329 - DNA, 21 bp, Artificial Sequence
  source: /note="Description of Artificial Sequence: Synthetic oligonucleotide"
tataagtcgtcggctggtagt

SEQ ID NO: 28330 - DNA, 21 bp, Artificial Sequence
  source: /note="Description of Artificial Sequence: Synthetic oligonucleotide"
tataagacgggtcgtctggct

SEQ ID NO: 28331 - DNA, 21 bp, Artificial Sequence
  source: /note="Description of Artificial Sequence: Synthetic oligonucleotide"
tataaggttttgccttctgct

SEQ ID NO: 28332 - DNA, 21 bp, Artificial Sequence
  source: /note="Description of Artificial Sequence: Synthetic oligonucleotide"
tatcttgctggtgagaggact

SEQ ID NO: 28333 - DNA, 21 bp, Artificial Sequence
  source: /note="Description of Artificial Sequence: Synthetic oligonucleotide"
tatcttgctcatgggcttcag

SEQ ID NO: 28334 - DNA, 21 bp, Artificial Sequence
  source: /note="Description of Artificial Sequence: Synthetic oligonucleotide"
tatttggcgcttcagtataag

SEQ ID NO: 28335 - DNA, 21 bp, Artificial Sequence
  source: /note="Description of Artificial Sequence: Synthetic oligonucleotide"
tatttggatcatatttgggag

SEQ ID NO: 28336 - DNA, 21 bp, Artificial Sequence
  source: /note="Description of Artificial Sequence: Synthetic oligonucleotide"
tatctggatacttcgcctgtt

SEQ ID NO: 28337 - DNA, 21 bp, Artificial Sequence
  source: /note="Description of Artificial Sequence: Synthetic oligonucleotide"
tatttggagcggtatgggtct

SEQ ID NO: 28338 - DNA, 21 bp, Artificial Sequence
  source: /note="Description of Artificial Sequence: Synthetic oligonucleotide"
tatcttggtgataagatggct

SEQ ID NO: 28339 - DNA, 21 bp, Artificial Sequence
  source: /note="Description of Artificial Sequence: Synthetic oligonucleotide"
tatcttgggcattcgacgaag

SEQ ID NO: 28340 - DNA, 21 bp, Artificial Sequence
  source: /note="Description of Artificial Sequence: Synthetic oligonucleotide"
tatcttggtacgcaggttaat

SEQ ID NO: 28341 - DNA, 21 bp, Artificial Sequence
  source: /note="Description of Artificial Sequence: Synthetic oligonucleotide"
tatttgaagtttactgattct

SEQ ID NO: 28342 - DNA, 21 bp, Artificial Sequence
  source: /note="Description of Artificial Sequence: Synthetic oligonucleotide"
tatttgaagtcgaattcgcct

SEQ ID NO: 28343 - DNA, 21 bp, Artificial Sequence
  source: /note="Description of Artificial Sequence: Synthetic oligonucleotide"
tatttgctttctgagctttct

SEQ ID NO: 28344 - DNA, 21 bp, Artificial Sequence
  source: /note="Description of Artificial Sequence: Synthetic oligonucleotide"
tatttgctgtctcatgctggg

SEQ ID NO: 28345 - DNA, 21 bp, Artificial Sequence
  source: /note="Description of Artificial Sequence: Synthetic oligonucleotide"
tatttgatgcatgcgtcggcg

SEQ ID NO: 28346 - DNA, 21 bp, Artificial Sequence
  source: /note="Description of Artificial Sequence: Synthetic oligonucleotide"
tatttgaatgtgacgcctgct

SEQ ID NO: 28347 - DNA, 21 bp, Artificial Sequence
  source: /note="Description of Artificial Sequence: Synthetic oligonucleotide"
tatcttcctaagtctaatttt

SEQ ID NO: 28348 - DNA, 21 bp, Artificial Sequence
  source: /note="Description of Artificial Sequence: Synthetic oligonucleotide"
tatctgccgttgactgctgtg

SEQ ID NO: 28349 - DNA, 21 bp, Artificial Sequence
  source: /note="Description of Artificial Sequence: Synthetic oligonucleotide"
tatttgccgcgtggtacgttt

SEQ ID NO: 28350 - DNA, 21 bp, Artificial Sequence
  source: /note="Description of Artificial Sequence: Synthetic oligonucleotide"
tatttgccgcgtggtacgtct

SEQ ID NO: 28351 - DNA, 21 bp, Artificial Sequence
  source: /note="Description of Artificial Sequence: Synthetic oligonucleotide"
tatcttccgacgaggcatgag

SEQ ID NO: 28352 - DNA, 21 bp, Artificial Sequence
  source: /note="Description of Artificial Sequence: Synthetic oligonucleotide"
tatcttcaggcgcattataat

SEQ ID NO: 28353 - DNA, 21 bp, Artificial Sequence
  source: /note="Description of Artificial Sequence: Synthetic oligonucleotide"
tatcttcagcatgggcatacg

SEQ ID NO: 28354 - DNA, 21 bp, Artificial Sequence
  source: /note="Description of Artificial Sequence: Synthetic oligonucleotide"
tatcttcagacggaggatcct

SEQ ID NO: 28355 - DNA, 21 bp, Artificial Sequence
  source: /note="Description of Artificial Sequence: Synthetic oligonucleotide"
tatttgaggcttcagactggt

SEQ ID NO: 28356 - DNA, 21 bp, Artificial Sequence
  source: /note="Description of Artificial Sequence: Synthetic oligonucleotide"
tatttgaggccgcagtctggg

SEQ ID NO: 28357 - DNA, 21 bp, Artificial Sequence
  source: /note="Description of Artificial Sequence: Synthetic oligonucleotide"
tatctttcggatcctcggatg

SEQ ID NO: 28358 - DNA, 21 bp, Artificial Sequence
  source: /note="Description of Artificial Sequence: Synthetic oligonucleotide"
tatttgtcgggtatgattaag

SEQ ID NO: 28359 - DNA, 21 bp, Artificial Sequence
  source: /note="Description of Artificial Sequence: Synthetic oligonucleotide"
tatctgtctcataggtctgag

SEQ ID NO: 28360 - DNA, 21 bp, Artificial Sequence
  source: /note="Description of Artificial Sequence: Synthetic oligonucleotide"
tatttgtctaatactgagatg

SEQ ID NO: 28361 - DNA, 21 bp, Artificial Sequence
  source: /note="Description of Artificial Sequence: Synthetic oligonucleotide"
tatttgtctgttgatgagtct

SEQ ID NO: 28362 - DNA, 21 bp, Artificial Sequence
  source: /note="Description of Artificial Sequence: Synthetic oligonucleotide"
tatcttagtgttcagtcgaat

SEQ ID NO: 28363 - DNA, 21 bp, Artificial Sequence
  source: /note="Description of Artificial Sequence: Synthetic oligonucleotide"
tatcttactaagcatacttcg

SEQ ID NO: 28364 - DNA, 21 bp, Artificial Sequence
  source: /note="Description of Artificial Sequence: Synthetic oligonucleotide"
tatcttactcagctgtcgacg

SEQ ID NO: 28365 - DNA, 21 bp, Artificial Sequence
  source: /note="Description of Artificial Sequence: Synthetic oligonucleotide"
tatcttgttgagacgactaag

SEQ ID NO: 28366 - DNA, 21 bp, Artificial Sequence
  source: /note="Description of Artificial Sequence: Synthetic oligonucleotide"
tatctggtgggtcagcgtgtg

SEQ ID NO: 28367 - DNA, 21 bp, Artificial Sequence
  source: /note="Description of Artificial Sequence: Synthetic oligonucleotide"
tatatggatactgatgatcgt

SEQ ID NO: 28368 - DNA, 21 bp, Artificial Sequence
  source: /note="Description of Artificial Sequence: Synthetic oligonucleotide"
tatatggggcatgctctttcg

SEQ ID NO: 28369 - DNA, 21 bp, Artificial Sequence
  source: /note="Description of Artificial Sequence: Synthetic oligonucleotide"
tatatgcatgcgtctaatgtg

SEQ ID NO: 28370 - DNA, 21 bp, Artificial Sequence
  source: /note="Description of Artificial Sequence: Synthetic oligonucleotide"
tatatgcatggttcgcatgct

SEQ ID NO: 28371 - DNA, 21 bp, Artificial Sequence
  source: /note="Description of Artificial Sequence: Synthetic oligonucleotide"
tatatgcattcgcctacgccg

SEQ ID NO: 28372 - DNA, 21 bp, Artificial Sequence
  source: /note="Description of Artificial Sequence: Synthetic oligonucleotide"
tatatgcattcgtcgaggacg

SEQ ID NO: 28373 - DNA, 21 bp, Artificial Sequence
  source: /note="Description of Artificial Sequence: Synthetic oligonucleotide"
tatatgcattatacggttacg

SEQ ID NO: 28374 - DNA, 21 bp, Artificial Sequence
  source: /note="Description of Artificial Sequence: Synthetic oligonucleotide"
tatatgcctgctcctgttcag

SEQ ID NO: 28375 - DNA, 21 bp, Artificial Sequence
  source: /note="Description of Artificial Sequence: Synthetic oligonucleotide"
tatatgcagacgcgggatact

SEQ ID NO: 28376 - DNA, 21 bp, Artificial Sequence
  source: /note="Description of Artificial Sequence: Synthetic oligonucleotide"
tatatgcaggttttttctccg

SEQ ID NO: 28377 - DNA, 21 bp, Artificial Sequence
  source: /note="Description of Artificial Sequence: Synthetic oligonucleotide"
tatatgtcggcgattcggatg

SEQ ID NO: 28378 - DNA, 21 bp, Artificial Sequence
  source: /note="Description of Artificial Sequence: Synthetic oligonucleotide"
tatatgtcggcgactacgcgt

SEQ ID NO: 28379 - DNA, 21 bp, Artificial Sequence
  source: /note="Description of Artificial Sequence: Synthetic oligonucleotide"
tatatgtctcggacggcttct

SEQ ID NO: 28380 - DNA, 21 bp, Artificial Sequence
  source: /note="Description of Artificial Sequence: Synthetic oligonucleotide"
tatatgtcggttacgcagcag

SEQ ID NO: 28381 - DNA, 21 bp, Artificial Sequence
  source: /note="Description of Artificial Sequence: Synthetic oligonucleotide"
tatatgactggtcgtccgcat

SEQ ID NO: 28382 - DNA, 21 bp, Artificial Sequence
  source: /note="Description of Artificial Sequence: Synthetic oligonucleotide"
tatatgactaagaattttggg

SEQ ID NO: 28383 - DNA, 21 bp, Artificial Sequence
  source: /note="Description of Artificial Sequence: Synthetic oligonucleotide"
tatatgacgaatcttcagcct

SEQ ID NO: 28384 - DNA, 21 bp, Artificial Sequence
  source: /note="Description of Artificial Sequence: Synthetic oligonucleotide"
tatatgactagtcagagtcgt

SEQ ID NO: 28385 - DNA, 21 bp, Artificial Sequence
  source: /note="Description of Artificial Sequence: Synthetic oligonucleotide"
tatatgtatgatggttcggtt

SEQ ID NO: 28386 - DNA, 21 bp, Artificial Sequence
  source: /note="Description of Artificial Sequence: Synthetic oligonucleotide"
tataatgcggcttctgggctg

SEQ ID NO: 28387 - DNA, 21 bp, Artificial Sequence
  source: /note="Description of Artificial Sequence: Synthetic oligonucleotide"
tataatgctggtggtcctagg

SEQ ID NO: 28388 - DNA, 21 bp, Artificial Sequence
  source: /note="Description of Artificial Sequence: Synthetic oligonucleotide"
tataatgcgcttcttcagcct

SEQ ID NO: 28389 - DNA, 21 bp, Artificial Sequence
  source: /note="Description of Artificial Sequence: Synthetic oligonucleotide"
tataatgatgttatgagtaat

SEQ ID NO: 28390 - DNA, 21 bp, Artificial Sequence
  source: /note="Description of Artificial Sequence: Synthetic oligonucleotide"
tataatgggaatctgcgtttg

SEQ ID NO: 28391 - DNA, 21 bp, Artificial Sequence
  source: /note="Description of Artificial Sequence: Synthetic oligonucleotide"
tataatggtcagcatattgcg

SEQ ID NO: 28392 - DNA, 21 bp, Artificial Sequence
  source: /note="Description of Artificial Sequence: Synthetic oligonucleotide"
tataatattggtacgtctaat

SEQ ID NO: 28393 - DNA, 21 bp, Artificial Sequence
  source: /note="Description of Artificial Sequence: Synthetic oligonucleotide"
tataatattaatcagctgact

SEQ ID NO: 28394 - DNA, 21 bp, Artificial Sequence
  source: /note="Description of Artificial Sequence: Synthetic oligonucleotide"
tataatctgcgtccgctgcag

SEQ ID NO: 28395 - DNA, 21 bp, Artificial Sequence
  source: /note="Description of Artificial Sequence: Synthetic oligonucleotide"
tataatttgagtggtccttcg

SEQ ID NO: 28396 - DNA, 21 bp, Artificial Sequence
  source: /note="Description of Artificial Sequence: Synthetic oligonucleotide"
tataatcttagtaatcctgct

SEQ ID NO: 28397 - DNA, 21 bp, Artificial Sequence
  source: /note="Description of Artificial Sequence: Synthetic oligonucleotide"
tataatcttagtgttgggttt

SEQ ID NO: 28398 - DNA, 21 bp, Artificial Sequence
  source: /note="Description of Artificial Sequence: Synthetic oligonucleotide"
tataataattctaatactact

SEQ ID NO: 28399 - DNA, 21 bp, Artificial Sequence
  source: /note="Description of Artificial Sequence: Synthetic oligonucleotide"
tataatcctcttaatcagcgt

SEQ ID NO: 28400 - DNA, 21 bp, Artificial Sequence
  source: /note="Description of Artificial Sequence: Synthetic oligonucleotide"
tataatccgccggagccgctg

SEQ ID NO: 28401 - DNA, 21 bp, Artificial Sequence
  source: /note="Description of Artificial Sequence: Synthetic oligonucleotide"
tataatccgcctcggtcttct

SEQ ID NO: 28402 - DNA, 21 bp, Artificial Sequence
  source: /note="Description of Artificial Sequence: Synthetic oligonucleotide"
tataatcagcatggtcctcct

SEQ ID NO: 28403 - DNA, 21 bp, Artificial Sequence
  source: /note="Description of Artificial Sequence: Synthetic oligonucleotide"
tataatcagcttgctcgtccg

SEQ ID NO: 28404 - DNA, 21 bp, Artificial Sequence
  source: /note="Description of Artificial Sequence: Synthetic oligonucleotide"
tataatcagcgtcctattgtt

SEQ ID NO: 28405 - DNA, 21 bp, Artificial Sequence
  source: /note="Description of Artificial Sequence: Synthetic oligonucleotide"
tataatagggctaatttgtct

SEQ ID NO: 28406 - DNA, 21 bp, Artificial Sequence
  source: /note="Description of Artificial Sequence: Synthetic oligonucleotide"
tataataggggtcagatgcag

SEQ ID NO: 28407 - DNA, 21 bp, Artificial Sequence
  source: /note="Description of Artificial Sequence: Synthetic oligonucleotide"
tataatcgtgtggctacgtcg

SEQ ID NO: 28408 - DNA, 21 bp, Artificial Sequence
  source: /note="Description of Artificial Sequence: Synthetic oligonucleotide"
tataattcttctggggtgcct

SEQ ID NO: 28409 - DNA, 21 bp, Artificial Sequence
  source: /note="Description of Artificial Sequence: Synthetic oligonucleotide"
tataatagttcgtcgcttggt

SEQ ID NO: 28410 - DNA, 21 bp, Artificial Sequence
  source: /note="Description of Artificial Sequence: Synthetic oligonucleotide"
tataatagtacgggtctgcgg

SEQ ID NO: 28411 - DNA, 21 bp, Artificial Sequence
  source: /note="Description of Artificial Sequence: Synthetic oligonucleotide"
tataatactggtcggattact

SEQ ID NO: 28412 - DNA, 21 bp, Artificial Sequence
  source: /note="Description of Artificial Sequence: Synthetic oligonucleotide"
tataatacgattaaggcggtt

SEQ ID NO: 28413 - DNA, 21 bp, Artificial Sequence
  source: /note="Description of Artificial Sequence: Synthetic oligonucleotide"
tataatactcctcggatggag

SEQ ID NO: 28414 - DNA, 21 bp, Artificial Sequence
  source: /note="Description of Artificial Sequence: Synthetic oligonucleotide"
tataatgttgagacggataat

SEQ ID NO: 28415 - DNA, 21 bp, Artificial Sequence
  source: /note="Description of Artificial Sequence: Synthetic oligonucleotide"
tataatgtgtatacggtgccg

SEQ ID NO: 28416 - DNA, 21 bp, Artificial Sequence
  source: /note="Description of Artificial Sequence: Synthetic oligonucleotide"
tatcctgcgctggatgtgttt

SEQ ID NO: 28417 - DNA, 21 bp, Artificial Sequence
  source: /note="Description of Artificial Sequence: Synthetic oligonucleotide"
tatcctgctaatcgtctgctg

SEQ ID NO: 28418 - DNA, 21 bp, Artificial Sequence
  source: /note="Description of Artificial Sequence: Synthetic oligonucleotide"
tatcctgatagtgatctgctg

SEQ ID NO: 28419 - DNA, 21 bp, Artificial Sequence
  source: /note="Description of Artificial Sequence: Synthetic oligonucleotide"
tatccgtttggggatatggcg

SEQ ID NO: 28420 - DNA, 21 bp, Artificial Sequence
  source: /note="Description of Artificial Sequence: Synthetic oligonucleotide"
tatcctggggctactgagacg

SEQ ID NO: 28421 - DNA, 21 bp, Artificial Sequence
  source: /note="Description of Artificial Sequence: Synthetic oligonucleotide"
tatcctgggactaagcagatg

SEQ ID NO: 28422 - DNA, 21 bp, Artificial Sequence
  source: /note="Description of Artificial Sequence: Synthetic oligonucleotide"
tatcctggtgtgacggtgaag

SEQ ID NO: 28423 - DNA, 21 bp, Artificial Sequence
  source: /note="Description of Artificial Sequence: Synthetic oligonucleotide"
tatcctcatgctgcttcttgg

SEQ ID NO: 28424 - DNA, 21 bp, Artificial Sequence
  source: /note="Description of Artificial Sequence: Synthetic oligonucleotide"
tatcctcatcattcgcagcat

SEQ ID NO: 28425 - DNA, 21 bp, Artificial Sequence
  source: /note="Description of Artificial Sequence: Synthetic oligonucleotide"
tatcctcatactcctgcggcg

SEQ ID NO: 28426 - DNA, 21 bp, Artificial Sequence
  source: /note="Description of Artificial Sequence: Synthetic oligonucleotide"
tatcctattgcgactgttagg

SEQ ID NO: 28427 - DNA, 21 bp, Artificial Sequence
  source: /note="Description of Artificial Sequence: Synthetic oligonucleotide"
tatcctattaggccgttgggt

SEQ ID NO: 28428 - DNA, 21 bp, Artificial Sequence
  source: /note="Description of Artificial Sequence: Synthetic oligonucleotide"
tatcctaaggtgcctacgttt

SEQ ID NO: 28429 - DNA, 21 bp, Artificial Sequence
  source: /note="Description of Artificial Sequence: Synthetic oligonucleotide"
tatcctaaggtgtattcggcg

SEQ ID NO: 28430 - DNA, 21 bp, Artificial Sequence
  source: /note="Description of Artificial Sequence: Synthetic oligonucleotide"
tatccgctgagtacgtcggct

SEQ ID NO: 28431 - DNA, 21 bp, Artificial Sequence
  source: /note="Description of Artificial Sequence: Synthetic oligonucleotide"
tatcctatgccgtctccgcct

SEQ ID NO: 28432 - DNA, 21 bp, Artificial Sequence
  source: /note="Description of Artificial Sequence: Synthetic oligonucleotide"
tatccgaatgattcttatgcg

SEQ ID NO: 28433 - DNA, 21 bp, Artificial Sequence
  source: /note="Description of Artificial Sequence: Synthetic oligonucleotide"
tatccgaatcatagtcgtaat

SEQ ID NO: 28434 - DNA, 21 bp, Artificial Sequence
  source: /note="Description of Artificial Sequence: Synthetic oligonucleotide"
tatcctaatagtctttcgttg

SEQ ID NO: 28435 - DNA, 21 bp, Artificial Sequence
  source: /note="Description of Artificial Sequence: Synthetic oligonucleotide"
tatcctcctgattctcatccg

SEQ ID NO: 28436 - DNA, 21 bp, Artificial Sequence
  source: /note="Description of Artificial Sequence: Synthetic oligonucleotide"
tatcctcctattgcgcagggt

SEQ ID NO: 28437 - DNA, 21 bp, Artificial Sequence
  source: /note="Description of Artificial Sequence: Synthetic oligonucleotide"
tatcctcctaagcttgggtct

SEQ ID NO: 28438 - DNA, 21 bp, Artificial Sequence
  source: /note="Description of Artificial Sequence: Synthetic oligonucleotide"
tatcctccgaagtatgcgaat

SEQ ID NO: 28439 - DNA, 21 bp, Artificial Sequence
  source: /note="Description of Artificial Sequence: Synthetic oligonucleotide"
tatcctcctcctaaggcttcg

SEQ ID NO: 28440 - DNA, 21 bp, Artificial Sequence
  source: /note="Description of Artificial Sequence: Synthetic oligonucleotide"
tatcctccttctgggtataat

SEQ ID NO: 28441 - DNA, 21 bp, Artificial Sequence
  source: /note="Description of Artificial Sequence: Synthetic oligonucleotide"
tatccgccgactgcgcgtgcg

SEQ ID NO: 28442 - DNA, 21 bp, Artificial Sequence
  source: /note="Description of Artificial Sequence: Synthetic oligonucleotide"
tatccgccgactccgttgccg

SEQ ID NO: 28443 - DNA, 21 bp, Artificial Sequence
  source: /note="Description of Artificial Sequence: Synthetic oligonucleotide"
tatcctccgtggcataatccg

SEQ ID NO: 28444 - DNA, 21 bp, Artificial Sequence
  source: /note="Description of Artificial Sequence: Synthetic oligonucleotide"
tatccgcgtgatgcgtcttct

SEQ ID NO: 28445 - DNA, 21 bp, Artificial Sequence
  source: /note="Description of Artificial Sequence: Synthetic oligonucleotide"
tatccgcgtgagaagtctttg

SEQ ID NO: 28446 - DNA, 21 bp, Artificial Sequence
  source: /note="Description of Artificial Sequence: Synthetic oligonucleotide"
tatccgcggcatccttctttt

SEQ ID NO: 28447 - DNA, 21 bp, Artificial Sequence
  source: /note="Description of Artificial Sequence: Synthetic oligonucleotide"
tatccgcggacgcttccggag

SEQ ID NO: 28448 - DNA, 21 bp, Artificial Sequence
  source: /note="Description of Artificial Sequence: Synthetic oligonucleotide"
tatccgtctgcgagtagtatg

SEQ ID NO: 28449 - DNA, 21 bp, Artificial Sequence
  source: /note="Description of Artificial Sequence: Synthetic oligonucleotide"
tatccgagtcatttgctgaat

SEQ ID NO: 28450 - DNA, 21 bp, Artificial Sequence
  source: /note="Description of Artificial Sequence: Synthetic oligonucleotide"
tatcctagtccggcgggggag

SEQ ID NO: 28451 - DNA, 21 bp, Artificial Sequence
  source: /note="Description of Artificial Sequence: Synthetic oligonucleotide"
tatccgtcgccgagtaatttg

SEQ ID NO: 28452 - DNA, 21 bp, Artificial Sequence
  source: /note="Description of Artificial Sequence: Synthetic oligonucleotide"
tatccttcttcttcgatgccg

SEQ ID NO: 28453 - DNA, 21 bp, Artificial Sequence
  source: /note="Description of Artificial Sequence: Synthetic oligonucleotide"
tatcctacgggtgagacgccg

SEQ ID NO: 28454 - DNA, 21 bp, Artificial Sequence
  source: /note="Description of Artificial Sequence: Synthetic oligonucleotide"
tatcctactcatagtcatatg

SEQ ID NO: 28455 - DNA, 21 bp, Artificial Sequence
  source: /note="Description of Artificial Sequence: Synthetic oligonucleotide"
tatcctactaagcatcttcat

SEQ ID NO: 28456 - DNA, 21 bp, Artificial Sequence
  source: /note="Description of Artificial Sequence: Synthetic oligonucleotide"
tatcctactacgcctctgatg

SEQ ID NO: 28457 - DNA, 21 bp, Artificial Sequence
  source: /note="Description of Artificial Sequence: Synthetic oligonucleotide"
tatccggttaatgcgcctact

SEQ ID NO: 28458 - DNA, 21 bp, Artificial Sequence
  source: /note="Description of Artificial Sequence: Synthetic oligonucleotide"
tatccggtgcaggatgctctt

SEQ ID NO: 28459 - DNA, 21 bp, Artificial Sequence
  source: /note="Description of Artificial Sequence: Synthetic oligonucleotide"
tatcctgttagtactactcag

SEQ ID NO: 28460 - DNA, 21 bp, Artificial Sequence
  source: /note="Description of Artificial Sequence: Synthetic oligonucleotide"
tatcagggtattgctctgggg

SEQ ID NO: 28461 - DNA, 21 bp, Artificial Sequence
  source: /note="Description of Artificial Sequence: Synthetic oligonucleotide"
tatcagggtacgctgccttct

SEQ ID NO: 28462 - DNA, 21 bp, Artificial Sequence
  source: /note="Description of Artificial Sequence: Synthetic oligonucleotide"
tatcagttggataatacgccg

SEQ ID NO: 28463 - DNA, 21 bp, Artificial Sequence
  source: /note="Description of Artificial Sequence: Synthetic oligonucleotide"
tatcagctgcagcggtcggag

SEQ ID NO: 28464 - DNA, 21 bp, Artificial Sequence
  source: /note="Description of Artificial Sequence: Synthetic oligonucleotide"
tatcagttgaggcagagtccg

SEQ ID NO: 28465 - DNA, 21 bp, Artificial Sequence
  source: /note="Description of Artificial Sequence: Synthetic oligonucleotide"
tatcagctggtgacgcagcct

SEQ ID NO: 28466 - DNA, 21 bp, Artificial Sequence
  source: /note="Description of Artificial Sequence: Synthetic oligonucleotide"
tatcagcctccggatatgggt

SEQ ID NO: 28467 - DNA, 21 bp, Artificial Sequence
  source: /note="Description of Artificial Sequence: Synthetic oligonucleotide"
tatcagcaggatggtcgttgt

SEQ ID NO: 28468 - DNA, 21 bp, Artificial Sequence
  source: /note="Description of Artificial Sequence: Synthetic oligonucleotide"
tatcagagggtgagtagttcg

SEQ ID NO: 28469 - DNA, 21 bp, Artificial Sequence
  source: /note="Description of Artificial Sequence: Synthetic oligonucleotide"
tatcagagtgatggtaatccg

SEQ ID NO: 28470 - DNA, 21 bp, Artificial Sequence
  source: /note="Description of Artificial Sequence: Synthetic oligonucleotide"
tatcagactgagattactcgg

SEQ ID NO: 28471 - DNA, 21 bp, Artificial Sequence
  source: /note="Description of Artificial Sequence: Synthetic oligonucleotide"
tatcagacttatactcgtgag

SEQ ID NO: 28472 - DNA, 21 bp, Artificial Sequence
  source: /note="Description of Artificial Sequence: Synthetic oligonucleotide"
tatcaggtgaagactgggcct

SEQ ID NO: 28473 - DNA, 21 bp, Artificial Sequence
  source: /note="Description of Artificial Sequence: Synthetic oligonucleotide"
tatcaggtgaatgctgggatg

SEQ ID NO: 28474 - DNA, 21 bp, Artificial Sequence
  source: /note="Description of Artificial Sequence: Synthetic oligonucleotide"
tatcgtgctgatggtgaggcg

SEQ ID NO: 28475 - DNA, 21 bp, Artificial Sequence
  source: /note="Description of Artificial Sequence: Synthetic oligonucleotide"
tatcgtgctatggctccgcct

SEQ ID NO: 28476 - DNA, 21 bp, Artificial Sequence
  source: /note="Description of Artificial Sequence: Synthetic oligonucleotide"
tatcgtgctaattcgcctgtg

SEQ ID NO: 28477 - DNA, 21 bp, Artificial Sequence
  source: /note="Description of Artificial Sequence: Synthetic oligonucleotide"
tatcgggcttctggggagctt

SEQ ID NO: 28478 - DNA, 21 bp, Artificial Sequence
  source: /note="Description of Artificial Sequence: Synthetic oligonucleotide"
tatagggatcatgaggttctg

SEQ ID NO: 28479 - DNA, 21 bp, Artificial Sequence
  source: /note="Description of Artificial Sequence: Synthetic oligonucleotide"
tatcgtgatattcagcgtggg

SEQ ID NO: 28480 - DNA, 21 bp, Artificial Sequence
  source: /note="Description of Artificial Sequence: Synthetic oligonucleotide"
tatagggataatcgtcctaat

SEQ ID NO: 28481 - DNA, 21 bp, Artificial Sequence
  source: /note="Description of Artificial Sequence: Synthetic oligonucleotide"
tatcgtgattcgtcgaatatt

SEQ ID NO: 28482 - DNA, 21 bp, Artificial Sequence
  source: /note="Description of Artificial Sequence: Synthetic oligonucleotide"
tatcgggagatggctaatcgg

SEQ ID NO: 28483 - DNA, 21 bp, Artificial Sequence
  source: /note="Description of Artificial Sequence: Synthetic oligonucleotide"
tatcgtgagaatgctagggcg

SEQ ID NO: 28484 - DNA, 21 bp, Artificial Sequence
  source: /note="Description of Artificial Sequence: Synthetic oligonucleotide"
tatagggggattactcttgat

SEQ ID NO: 28485 - DNA, 21 bp, Artificial Sequence
  source: /note="Description of Artificial Sequence: Synthetic oligonucleotide"
tatcgtgggaatcatgctcct

SEQ ID NO: 28486 - DNA, 21 bp, Artificial Sequence
  source: /note="Description of Artificial Sequence: Synthetic oligonucleotide"
tatcgtgggtatcatgtggag

SEQ ID NO: 28487 - DNA, 21 bp, Artificial Sequence
  source: /note="Description of Artificial Sequence: Synthetic oligonucleotide"
tataggcatggttctattgag

SEQ ID NO: 28488 - DNA, 21 bp, Artificial Sequence
  source: /note="Description of Artificial Sequence: Synthetic oligonucleotide"
tataggctgtatgctgatgat

SEQ ID NO: 28489 - DNA, 21 bp, Artificial Sequence
  source: /note="Description of Artificial Sequence: Synthetic oligonucleotide"
tatcggatgggtacggatcag

SEQ ID NO: 28490 - DNA, 21 bp, Artificial Sequence
  source: /note="Description of Artificial Sequence: Synthetic oligonucleotide"
tatcgtcctggtgcgtcggct

SEQ ID NO: 28491 - DNA, 21 bp, Artificial Sequence
  source: /note="Description of Artificial Sequence: Synthetic oligonucleotide"
tatcgtccgctttctactcct

SEQ ID NO: 28492 - DNA, 21 bp, Artificial Sequence
  source: /note="Description of Artificial Sequence: Synthetic oligonucleotide"
tatcggcctcaggagaatgat

SEQ ID NO: 28493 - DNA, 21 bp, Artificial Sequence
  source: /note="Description of Artificial Sequence: Synthetic oligonucleotide"
tataggcaggctttggatcat

SEQ ID NO: 28494 - DNA, 21 bp, Artificial Sequence
  source: /note="Description of Artificial Sequence: Synthetic oligonucleotide"
tatcgtcagctggattttccg

SEQ ID NO: 28495 - DNA, 21 bp, Artificial Sequence
  source: /note="Description of Artificial Sequence: Synthetic oligonucleotide"
tatcgtcagacgcgtgatccg

SEQ ID NO: 28496 - DNA, 21 bp, Artificial Sequence
  source: /note="Description of Artificial Sequence: Synthetic oligonucleotide"
tatcgtcaggttactgaggtg

SEQ ID NO: 28497 - DNA, 21 bp, Artificial Sequence
  source: /note="Description of Artificial Sequence: Synthetic oligonucleotide"
tatcggtctgatacgttgcgt

SEQ ID NO: 28498 - DNA, 21 bp, Artificial Sequence
  source: /note="Description of Artificial Sequence: Synthetic oligonucleotide"
tatcgttctcatactccgcct

SEQ ID NO: 28499 - DNA, 21 bp, Artificial Sequence
  source: /note="Description of Artificial Sequence: Synthetic oligonucleotide"
tatcggagtattgttcctgat

SEQ ID NO: 28500 - DNA, 21 bp, Artificial Sequence
  source: /note="Description of Artificial Sequence: Synthetic oligonucleotide"
tatcggtctccggatgagatg

SEQ ID NO: 28501 - DNA, 21 bp, Artificial Sequence
  source: /note="Description of Artificial Sequence: Synthetic oligonucleotide"
tatcggagttcgacgccggat

SEQ ID NO: 28502 - DNA, 21 bp, Artificial Sequence
  source: /note="Description of Artificial Sequence: Synthetic oligonucleotide"
tatcgttcggttgttcagagt

SEQ ID NO: 28503 - DNA, 21 bp, Artificial Sequence
  source: /note="Description of Artificial Sequence: Synthetic oligonucleotide"
tatcgtacggcgactcctcct

SEQ ID NO: 28504 - DNA, 21 bp, Artificial Sequence
  source: /note="Description of Artificial Sequence: Synthetic oligonucleotide"
tatcggacggagcagctgggt

SEQ ID NO: 28505 - DNA, 21 bp, Artificial Sequence
  source: /note="Description of Artificial Sequence: Synthetic oligonucleotide"
tatcgtacgattgattctggg

SEQ ID NO: 28506 - DNA, 21 bp, Artificial Sequence
  source: /note="Description of Artificial Sequence: Synthetic oligonucleotide"
tataggactttggataatccg

SEQ ID NO: 28507 - DNA, 21 bp, Artificial Sequence
  source: /note="Description of Artificial Sequence: Synthetic oligonucleotide"
tatcggacgccggcgtcttcg

SEQ ID NO: 28508 - DNA, 21 bp, Artificial Sequence
  source: /note="Description of Artificial Sequence: Synthetic oligonucleotide"
tatcgtacgcagccgactcag

SEQ ID NO: 28509 - DNA, 21 bp, Artificial Sequence
  source: /note="Description of Artificial Sequence: Synthetic oligonucleotide"
tatagggttgatagtgctaat

SEQ ID NO: 28510 - DNA, 21 bp, Artificial Sequence
  source: /note="Description of Artificial Sequence: Synthetic oligonucleotide"
tatcgtgtgtcgatgttgtct

SEQ ID NO: 28511 - DNA, 21 bp, Artificial Sequence
  source: /note="Description of Artificial Sequence: Synthetic oligonucleotide"
tatcgtgtgtcgatgtcgagt

SEQ ID NO: 28512 - DNA, 21 bp, Artificial Sequence
  source: /note="Description of Artificial Sequence: Synthetic oligonucleotide"
tatcgggtggttgttgggccg

SEQ ID NO: 28513 - DNA, 21 bp, Artificial Sequence
  source: /note="Description of Artificial Sequence: Synthetic oligonucleotide"
tattctgcgcattctgctcgt

SEQ ID NO: 28514 - DNA, 21 bp, Artificial Sequence
  source: /note="Description of Artificial Sequence: Synthetic oligonucleotide"
tatagtgcttcttcgtatctt

SEQ ID NO: 28515 - DNA, 21 bp, Artificial Sequence
  source: /note="Description of Artificial Sequence: Synthetic oligonucleotide"
tattctgatccggcgcggcct

SEQ ID NO: 28516 - DNA, 21 bp, Artificial Sequence
  source: /note="Description of Artificial Sequence: Synthetic oligonucleotide"
tatagtgattctccgaagcag

SEQ ID NO: 28517 - DNA, 21 bp, Artificial Sequence
  source: /note="Description of Artificial Sequence: Synthetic oligonucleotide"
tattcggatacggattcttct

SEQ ID NO: 28518 - DNA, 21 bp, Artificial Sequence
  source: /note="Description of Artificial Sequence: Synthetic oligonucleotide"
tatagtgattatggtcgtccg

SEQ ID NO: 28519 - DNA, 21 bp, Artificial Sequence
  source: /note="Description of Artificial Sequence: Synthetic oligonucleotide"
tatagtgaggcgaatattcgg

SEQ ID NO: 28520 - DNA, 21 bp, Artificial Sequence
  source: /note="Description of Artificial Sequence: Synthetic oligonucleotide"
tattctgagtttacgctgaat

SEQ ID NO: 28521 - DNA, 21 bp, Artificial Sequence
  source: /note="Description of Artificial Sequence: Synthetic oligonucleotide"
tattcttttcctactagtgct

SEQ ID NO: 28522 - DNA, 21 bp, Artificial Sequence
  source: /note="Description of Artificial Sequence: Synthetic oligonucleotide"
tatagtgggcatgatacttcg

SEQ ID NO: 28523 - DNA, 21 bp, Artificial Sequence
  source: /note="Description of Artificial Sequence: Synthetic oligonucleotide"
tattcggggcgtattggtcct

SEQ ID NO: 28524 - DNA, 21 bp, Artificial Sequence
  source: /note="Description of Artificial Sequence: Synthetic oligonucleotide"
tattctgggcggcctgcgagt

SEQ ID NO: 28525 - DNA, 21 bp, Artificial Sequence
  source: /note="Description of Artificial Sequence: Synthetic oligonucleotide"
tattcgggtagtagtaggaat

SEQ ID NO: 28526 - DNA, 21 bp, Artificial Sequence
  source: /note="Description of Artificial Sequence: Synthetic oligonucleotide"
tattctgggactggttttgcg

SEQ ID NO: 28527 - DNA, 21 bp, Artificial Sequence
  source: /note="Description of Artificial Sequence: Synthetic oligonucleotide"
tattctcatgcgaatctgcct

SEQ ID NO: 28528 - DNA, 21 bp, Artificial Sequence
  source: /note="Description of Artificial Sequence: Synthetic oligonucleotide"
tattctcatgaggctgtgatg

SEQ ID NO: 28529 - DNA, 21 bp, Artificial Sequence
  source: /note="Description of Artificial Sequence: Synthetic oligonucleotide"
tattcgcatattgaggggtct

SEQ ID NO: 28530 - DNA, 21 bp, Artificial Sequence
  source: /note="Description of Artificial Sequence: Synthetic oligonucleotide"
tatagtcatactcagatgtct

SEQ ID NO: 28531 - DNA, 21 bp, Artificial Sequence
  source: /note="Description of Artificial Sequence: Synthetic oligonucleotide"
tattctcatgttacgacttgt

SEQ ID NO: 28532 - DNA, 21 bp, Artificial Sequence
  source: /note="Description of Artificial Sequence: Synthetic oligonucleotide"
tattcgattgctcatcagtcg

SEQ ID NO: 28533 - DNA, 21 bp, Artificial Sequence
  source: /note="Description of Artificial Sequence: Synthetic oligonucleotide"
tatagtcttgcgtattcgcct

SEQ ID NO: 28534 - DNA, 21 bp, Artificial Sequence
  source: /note="Description of Artificial Sequence: Synthetic oligonucleotide"
tatagtcttgaggatgctccg

SEQ ID NO: 28535 - DNA, 21 bp, Artificial Sequence
  source: /note="Description of Artificial Sequence: Synthetic oligonucleotide"
tattcgctggggggtccgtcg

SEQ ID NO: 28536 - DNA, 21 bp, Artificial Sequence
  source: /note="Description of Artificial Sequence: Synthetic oligonucleotide"
tatagtttgccgactgatctt

SEQ ID NO: 28537 - DNA, 21 bp, Artificial Sequence
  source: /note="Description of Artificial Sequence: Synthetic oligonucleotide"
tattcgctgagtcatccttct

SEQ ID NO: 28538 - DNA, 21 bp, Artificial Sequence
  source: /note="Description of Artificial Sequence: Synthetic oligonucleotide"
tattctctgactttgcatgat

SEQ ID NO: 28539 - DNA, 21 bp, Artificial Sequence
  source: /note="Description of Artificial Sequence: Synthetic oligonucleotide"
tattcgatgcatgcggctatt

SEQ ID NO: 28540 - DNA, 21 bp, Artificial Sequence
  source: /note="Description of Artificial Sequence: Synthetic oligonucleotide"
tatagtatgaataagtctcct

SEQ ID NO: 28541 - DNA, 21 bp, Artificial Sequence
  source: /note="Description of Artificial Sequence: Synthetic oligonucleotide"
tatagtatggtgcgtactcct

SEQ ID NO: 28542 - DNA, 21 bp, Artificial Sequence
  source: /note="Description of Artificial Sequence: Synthetic oligonucleotide"
tattctaatgaggcgccgcgt

SEQ ID NO: 28543 - DNA, 21 bp, Artificial Sequence
  source: /note="Description of Artificial Sequence: Synthetic oligonucleotide"
tattctaatgagaagtgggcg

SEQ ID NO: 28544 - DNA, 21 bp, Artificial Sequence
  source: /note="Description of Artificial Sequence: Synthetic oligonucleotide"
tatagtaatcaggctcgtggt

SEQ ID NO: 28545 - DNA, 21 bp, Artificial Sequence
  source: /note="Description of Artificial Sequence: Synthetic oligonucleotide"
tattctccgcattttcgtcct

SEQ ID NO: 28546 - DNA, 21 bp, Artificial Sequence
  source: /note="Description of Artificial Sequence: Synthetic oligonucleotide"
tattctccgattaagactcat

SEQ ID NO: 28547 - DNA, 21 bp, Artificial Sequence
  source: /note="Description of Artificial Sequence: Synthetic oligonucleotide"
tattctccgatttcgggttct

SEQ ID NO: 28548 - DNA, 21 bp, Artificial Sequence
  source: /note="Description of Artificial Sequence: Synthetic oligonucleotide"
tatagtccgttgccttcgcgg

SEQ ID NO: 28549 - DNA, 21 bp, Artificial Sequence
  source: /note="Description of Artificial Sequence: Synthetic oligonucleotide"
tattctccgctgagtcatcat

SEQ ID NO: 28550 - DNA, 21 bp, Artificial Sequence
  source: /note="Description of Artificial Sequence: Synthetic oligonucleotide"
tattctccgaatctgaatggt

SEQ ID NO: 28551 - DNA, 21 bp, Artificial Sequence
  source: /note="Description of Artificial Sequence: Synthetic oligonucleotide"
tattcgccgccgccgtctatg

SEQ ID NO: 28552 - DNA, 21 bp, Artificial Sequence
  source: /note="Description of Artificial Sequence: Synthetic oligonucleotide"
tatagtccgaggacgcctact

SEQ ID NO: 28553 - DNA, 21 bp, Artificial Sequence
  source: /note="Description of Artificial Sequence: Synthetic oligonucleotide"
tattctccgaggacgtctttg

SEQ ID NO: 28554 - DNA, 21 bp, Artificial Sequence
  source: /note="Description of Artificial Sequence: Synthetic oligonucleotide"
tattcgcctacggaggctttt

SEQ ID NO: 28555 - DNA, 21 bp, Artificial Sequence
  source: /note="Description of Artificial Sequence: Synthetic oligonucleotide"
tatagtcctactaggtcgtcg

SEQ ID NO: 28556 - DNA, 21 bp, Artificial Sequence
  source: /note="Description of Artificial Sequence: Synthetic oligonucleotide"
tatagtcagcgtggtgcggat

SEQ ID NO: 28557 - DNA, 21 bp, Artificial Sequence
  source: /note="Description of Artificial Sequence: Synthetic oligonucleotide"
tattcgcagcggaatgattcg

SEQ ID NO: 28558 - DNA, 21 bp, Artificial Sequence
  source: /note="Description of Artificial Sequence: Synthetic oligonucleotide"
tattctaggccttctccgctt

SEQ ID NO: 28559 - DNA, 21 bp, Artificial Sequence
  source: /note="Description of Artificial Sequence: Synthetic oligonucleotide"
tattcgtctggtgggctgcgg

SEQ ID NO: 28560 - DNA, 21 bp, Artificial Sequence
  source: /note="Description of Artificial Sequence: Synthetic oligonucleotide"
tattcgtctcatttgaggaat

SEQ ID NO: 28561 - DNA, 21 bp, Artificial Sequence
  source: /note="Description of Artificial Sequence: Synthetic oligonucleotide"
tatagttctcattctagttct

SEQ ID NO: 28562 - DNA, 21 bp, Artificial Sequence
  source: /note="Description of Artificial Sequence: Synthetic oligonucleotide"
tattcgagtcttgctgcgctg

SEQ ID NO: 28563 - DNA, 21 bp, Artificial Sequence
  source: /note="Description of Artificial Sequence: Synthetic oligonucleotide"
tattcttctaatttggcgcgg

SEQ ID NO: 28564 - DNA, 21 bp, Artificial Sequence
  source: /note="Description of Artificial Sequence: Synthetic oligonucleotide"
tattcgagtccggattggtct

SEQ ID NO: 28565 - DNA, 21 bp, Artificial Sequence
  source: /note="Description of Artificial Sequence: Synthetic oligonucleotide"
tatagttcgccgccgattacg

SEQ ID NO: 28566 - DNA, 21 bp, Artificial Sequence
  source: /note="Description of Artificial Sequence: Synthetic oligonucleotide"
tattcgtctcagttgtcggag

SEQ ID NO: 28567 - DNA, 21 bp, Artificial Sequence
  source: /note="Description of Artificial Sequence: Synthetic oligonucleotide"
tattcgtctcgtggtgaggcg

SEQ ID NO: 28568 - DNA, 21 bp, Artificial Sequence
  source: /note="Description of Artificial Sequence: Synthetic oligonucleotide"
tattcgtcttcggtgttggcg

SEQ ID NO: 28569 - DNA, 21 bp, Artificial Sequence
  source: /note="Description of Artificial Sequence: Synthetic oligonucleotide"
tatagtacggataggtattcg

SEQ ID NO: 28570 - DNA, 21 bp, Artificial Sequence
  source: /note="Description of Artificial Sequence: Synthetic oligonucleotide"
tatagtacgtttcagcctgag

SEQ ID NO: 28571 - DNA, 21 bp, Artificial Sequence
  source: /note="Description of Artificial Sequence: Synthetic oligonucleotide"
tatagtacgatgcgtagtatg

SEQ ID NO: 28572 - DNA, 21 bp, Artificial Sequence
  source: /note="Description of Artificial Sequence: Synthetic oligonucleotide"
tattctactcagtctctgaat

SEQ ID NO: 28573 - DNA, 21 bp, Artificial Sequence
  source: /note="Description of Artificial Sequence: Synthetic oligonucleotide"
tatagtactcgttcgcttagt

SEQ ID NO: 28574 - DNA, 21 bp, Artificial Sequence
  source: /note="Description of Artificial Sequence: Synthetic oligonucleotide"
tattcgactactggtcggctg

SEQ ID NO: 28575 - DNA, 21 bp, Artificial Sequence
  source: /note="Description of Artificial Sequence: Synthetic oligonucleotide"
tattcgactacggttcatgct

SEQ ID NO: 28576 - DNA, 21 bp, Artificial Sequence
  source: /note="Description of Artificial Sequence: Synthetic oligonucleotide"
tattcgacggttggtagtagt

SEQ ID NO: 28577 - DNA, 21 bp, Artificial Sequence
  source: /note="Description of Artificial Sequence: Synthetic oligonucleotide"
tatagtgttgatgctgtttgg

SEQ ID NO: 28578 - DNA, 21 bp, Artificial Sequence
  source: /note="Description of Artificial Sequence: Synthetic oligonucleotide"
tattctgttcgtacgatgtct

SEQ ID NO: 28579 - DNA, 21 bp, Artificial Sequence
  source: /note="Description of Artificial Sequence: Synthetic oligonucleotide"
tattcggttgtgacggttgat

SEQ ID NO: 28580 - DNA, 21 bp, Artificial Sequence
  source: /note="Description of Artificial Sequence: Synthetic oligonucleotide"
tattcttataattcggatcat

SEQ ID NO: 28581 - DNA, 21 bp, Artificial Sequence
  source: /note="Description of Artificial Sequence: Synthetic oligonucleotide"
tatactgcgggggtgtcggcg

SEQ ID NO: 28582 - DNA, 21 bp, Artificial Sequence
  source: /note="Description of Artificial Sequence: Synthetic oligonucleotide"
tatacggcgcgtgctcagagt

SEQ ID NO: 28583 - DNA, 21 bp, Artificial Sequence
  source: /note="Description of Artificial Sequence: Synthetic oligonucleotide"
tatactgctagtggggatatt

SEQ ID NO: 28584 - DNA, 21 bp, Artificial Sequence
  source: /note="Description of Artificial Sequence: Synthetic oligonucleotide"
tatacggagtttgcggctaat

SEQ ID NO: 28585 - DNA, 21 bp, Artificial Sequence
  source: /note="Description of Artificial Sequence: Synthetic oligonucleotide"
tatactggttttacgcttgat

SEQ ID NO: 28586 - DNA, 21 bp, Artificial Sequence
  source: /note="Description of Artificial Sequence: Synthetic oligonucleotide"
tatactggtgggcagctgcat

SEQ ID NO: 28587 - DNA, 21 bp, Artificial Sequence
  source: /note="Description of Artificial Sequence: Synthetic oligonucleotide"
tatacggggttggagccgtct

SEQ ID NO: 28588 - DNA, 21 bp, Artificial Sequence
  source: /note="Description of Artificial Sequence: Synthetic oligonucleotide"
tatacggggtcttctgttctg

SEQ ID NO: 28589 - DNA, 21 bp, Artificial Sequence
  source: /note="Description of Artificial Sequence: Synthetic oligonucleotide"
tatacgcatttgactactgct

SEQ ID NO: 28590 - DNA, 21 bp, Artificial Sequence
  source: /note="Description of Artificial Sequence: Synthetic oligonucleotide"
tatactcatagtattgttact

SEQ ID NO: 28591 - DNA, 21 bp, Artificial Sequence
  source: /note="Description of Artificial Sequence: Synthetic oligonucleotide"
tatactcatgtgctgactccg

SEQ ID NO: 28592 - DNA, 21 bp, Artificial Sequence
  source: /note="Description of Artificial Sequence: Synthetic oligonucleotide"
tatactaagatgctggggcct

SEQ ID NO: 28593 - DNA, 21 bp, Artificial Sequence
  source: /note="Description of Artificial Sequence: Synthetic oligonucleotide"
tatacgaagaatagtacggtt

SEQ ID NO: 28594 - DNA, 21 bp, Artificial Sequence
  source: /note="Description of Artificial Sequence: Synthetic oligonucleotide"
tatacgttggatcagttgtcg

SEQ ID NO: 28595 - DNA, 21 bp, Artificial Sequence
  source: /note="Description of Artificial Sequence: Synthetic oligonucleotide"
tatactctgtctgcgacgacg

SEQ ID NO: 28596 - DNA, 21 bp, Artificial Sequence
  source: /note="Description of Artificial Sequence: Synthetic oligonucleotide"
tatacgatgtcgcctcgtccg

SEQ ID NO: 28597 - DNA, 21 bp, Artificial Sequence
  source: /note="Description of Artificial Sequence: Synthetic oligonucleotide"
tatactaatgatcgtaggtct

SEQ ID NO: 28598 - DNA, 21 bp, Artificial Sequence
  source: /note="Description of Artificial Sequence: Synthetic oligonucleotide"
tatacgaataattttgttgcg

SEQ ID NO: 28599 - DNA, 21 bp, Artificial Sequence
  source: /note="Description of Artificial Sequence: Synthetic oligonucleotide"
tatactcctgctgggcttagt

SEQ ID NO: 28600 - DNA, 21 bp, Artificial Sequence
  source: /note="Description of Artificial Sequence: Synthetic oligonucleotide"
tatacgcctcataggatgtct

SEQ ID NO: 28601 - DNA, 21 bp, Artificial Sequence
  source: /note="Description of Artificial Sequence: Synthetic oligonucleotide"
tatacgcctctgatgtcttcg

SEQ ID NO: 28602 - DNA, 21 bp, Artificial Sequence
  source: /note="Description of Artificial Sequence: Synthetic oligonucleotide"
tatactcagtcgaagactgag

SEQ ID NO: 28603 - DNA, 21 bp, Artificial Sequence
  source: /note="Description of Artificial Sequence: Synthetic oligonucleotide"
tatacgcagacgacgtggaag

SEQ ID NO: 28604 - DNA, 21 bp, Artificial Sequence
  source: /note="Description of Artificial Sequence: Synthetic oligonucleotide"
tatactcgtgcgccggatggt

SEQ ID NO: 28605 - DNA, 21 bp, Artificial Sequence
  source: /note="Description of Artificial Sequence: Synthetic oligonucleotide"
tatacgtcgcatccgacttgt

SEQ ID NO: 28606 - DNA, 21 bp, Artificial Sequence
  source: /note="Description of Artificial Sequence: Synthetic oligonucleotide"
tatacgtcgattagtaatatg

SEQ ID NO: 28607 - DNA, 21 bp, Artificial Sequence
  source: /note="Description of Artificial Sequence: Synthetic oligonucleotide"
tatacgtcgctttctatggcg

SEQ ID NO: 28608 - DNA, 21 bp, Artificial Sequence
  source: /note="Description of Artificial Sequence: Synthetic oligonucleotide"
tatacgtctatgcatgtttct

SEQ ID NO: 28609 - DNA, 21 bp, Artificial Sequence
  source: /note="Description of Artificial Sequence: Synthetic oligonucleotide"
tatacgtctaatattgatatg

SEQ ID NO: 28610 - DNA, 21 bp, Artificial Sequence
  source: /note="Description of Artificial Sequence: Synthetic oligonucleotide"
tatacgtcgccggctcatgtg

SEQ ID NO: 28611 - DNA, 21 bp, Artificial Sequence
  source: /note="Description of Artificial Sequence: Synthetic oligonucleotide"
tatacgtcgaggcatattgct

SEQ ID NO: 28612 - DNA, 21 bp, Artificial Sequence
  source: /note="Description of Artificial Sequence: Synthetic oligonucleotide"
tatacttctcgtgtgctttct

SEQ ID NO: 28613 - DNA, 21 bp, Artificial Sequence
  source: /note="Description of Artificial Sequence: Synthetic oligonucleotide"
tatacttcggtttatgctcat

SEQ ID NO: 28614 - DNA, 21 bp, Artificial Sequence
  source: /note="Description of Artificial Sequence: Synthetic oligonucleotide"
tatactagttatactgctcct

SEQ ID NO: 28615 - DNA, 21 bp, Artificial Sequence
  source: /note="Description of Artificial Sequence: Synthetic oligonucleotide"
tatactacgctgcctgcgcgt

SEQ ID NO: 28616 - DNA, 21 bp, Artificial Sequence
  source: /note="Description of Artificial Sequence: Synthetic oligonucleotide"
tatacgacgaatcgtcagtct

SEQ ID NO: 28617 - DNA, 21 bp, Artificial Sequence
  source: /note="Description of Artificial Sequence: Synthetic oligonucleotide"
tatactacttctccggctctt

SEQ ID NO: 28618 - DNA, 21 bp, Artificial Sequence
  source: /note="Description of Artificial Sequence: Synthetic oligonucleotide"
tatactactagtcctattaag

SEQ ID NO: 28619 - DNA, 21 bp, Artificial Sequence
  source: /note="Description of Artificial Sequence: Synthetic oligonucleotide"
tatactgttcgtcatgttaat

SEQ ID NO: 28620 - DNA, 21 bp, Artificial Sequence
  source: /note="Description of Artificial Sequence: Synthetic oligonucleotide"
tatgttgctactgagcagaag

SEQ ID NO: 28621 - DNA, 21 bp, Artificial Sequence
  source: /note="Description of Artificial Sequence: Synthetic oligonucleotide"
tatgttgatgatcctagtggg

SEQ ID NO: 28622 - DNA, 21 bp, Artificial Sequence
  source: /note="Description of Artificial Sequence: Synthetic oligonucleotide"
tatgttcatcttaatactacg

SEQ ID NO: 28623 - DNA, 21 bp, Artificial Sequence
  source: /note="Description of Artificial Sequence: Synthetic oligonucleotide"
tatgtgaagttgtatgagaag

SEQ ID NO: 28624 - DNA, 21 bp, Artificial Sequence
  source: /note="Description of Artificial Sequence: Synthetic oligonucleotide"
tatgttaagccgaatggtgct

SEQ ID NO: 28625 - DNA, 21 bp, Artificial Sequence
  source: /note="Description of Artificial Sequence: Synthetic oligonucleotide"
tatgttaagtcgcagacggct

SEQ ID NO: 28626 - DNA, 21 bp, Artificial Sequence
  source: /note="Description of Artificial Sequence: Synthetic oligonucleotide"
tatgtgatgtcgcagtctgcg

SEQ ID NO: 28627 - DNA, 21 bp, Artificial Sequence
  source: /note="Description of Artificial Sequence: Synthetic oligonucleotide"
tatgttccgggtcggaatgag

SEQ ID NO: 28628 - DNA, 21 bp, Artificial Sequence
  source: /note="Description of Artificial Sequence: Synthetic oligonucleotide"
tatgtgcctatgacgtctcct

SEQ ID NO: 28629 - DNA, 21 bp, Artificial Sequence
  source: /note="Description of Artificial Sequence: Synthetic oligonucleotide"
tatgttcctacttcgcttggg

SEQ ID NO: 28630 - DNA, 21 bp, Artificial Sequence
  source: /note="Description of Artificial Sequence: Synthetic oligonucleotide"
tatgtgcagcagcatgtgaag

SEQ ID NO: 28631 - DNA, 21 bp, Artificial Sequence
  source: /note="Description of Artificial Sequence: Synthetic oligonucleotide"
tatgttcgggggatggatgct

SEQ ID NO: 28632 - DNA, 21 bp, Artificial Sequence
  source: /note="Description of Artificial Sequence: Synthetic oligonucleotide"
tatgtgcgggtgagtaatgtt

SEQ ID NO: 28633 - DNA, 21 bp, Artificial Sequence
  source: /note="Description of Artificial Sequence: Synthetic oligonucleotide"
tatgtttcgcatgtggatttg

SEQ ID NO: 28634 - DNA, 21 bp, Artificial Sequence
  source: /note="Description of Artificial Sequence: Synthetic oligonucleotide"
tatgtttctatgccgaatggt

SEQ ID NO: 28635 - DNA, 21 bp, Artificial Sequence
  source: /note="Description of Artificial Sequence: Synthetic oligonucleotide"
tatgttacggatcggatgccg

SEQ ID NO: 28636 - DNA, 21 bp, Artificial Sequence
  source: /note="Description of Artificial Sequence: Synthetic oligonucleotide"
tatgtgactggtcatcatgat

SEQ ID NO: 28637 - DNA, 21 bp, Artificial Sequence
  source: /note="Description of Artificial Sequence: Synthetic oligonucleotide"
tatgttactaaggcgccgctt

SEQ ID NO: 28638 - DNA, 21 bp, Artificial Sequence
  source: /note="Description of Artificial Sequence: Synthetic oligonucleotide"
tatgtgacgcagattcatggg

SEQ ID NO: 28639 - DNA, 21 bp, Artificial Sequence
  source: /note="Description of Artificial Sequence: Synthetic oligonucleotide"
tatgttgtggagccggagccg

SEQ ID NO: 28640 - DNA, 21 bp, Artificial Sequence
  source: /note="Description of Artificial Sequence: Synthetic oligonucleotide"
tatgttgttaatctgccgcgt

SEQ ID NO: 28641 - DNA, 21 bp, Artificial Sequence
  source: /note="Description of Artificial Sequence: Synthetic oligonucleotide"
tatgttgttcgggcggatggg

SEQ ID NO: 28642 - DNA, 21 bp, Artificial Sequence
  source: /note="Description of Artificial Sequence: Synthetic oligonucleotide"
tattatgatcgtagtattggg

SEQ ID NO: 28643 - DNA, 21 bp, Artificial Sequence
  source: /note="Description of Artificial Sequence: Synthetic oligonucleotide"
tattatgagtcgtcgaagcag

SEQ ID NO: 28644 - DNA, 21 bp, Artificial Sequence
  source: /note="Description of Artificial Sequence: Synthetic oligonucleotide"
tattatgggagtgcgcctgct

SEQ ID NO: 28645 - DNA, 21 bp, Artificial Sequence
  source: /note="Description of Artificial Sequence: Synthetic oligonucleotide"
tattatggggtgcatcctaat

SEQ ID NO: 28646 - DNA, 21 bp, Artificial Sequence
  source: /note="Description of Artificial Sequence: Synthetic oligonucleotide"
tattataatccgagtacttct

SEQ ID NO: 28647 - DNA, 21 bp, Artificial Sequence
  source: /note="Description of Artificial Sequence: Synthetic oligonucleotide"
tattatccgcgtcctggtggg

SEQ ID NO: 28648 - DNA, 21 bp, Artificial Sequence
  source: /note="Description of Artificial Sequence: Synthetic oligonucleotide"
tattatagtgctatggctgat

SEQ ID NO: 28649 - DNA, 21 bp, Artificial Sequence
  source: /note="Description of Artificial Sequence: Synthetic oligonucleotide"
tattatagtaatacggttact

SEQ ID NO: 28650 - DNA, 21 bp, Artificial Sequence
  source: /note="Description of Artificial Sequence: Synthetic oligonucleotide"
gcagcagcagcaagcaacaca

SEQ ID NO: 28651 - DNA, 21 bp, Artificial Sequence
  source: /note="Description of Artificial Sequence: Synthetic oligonucleotide"
gcagcagcaatcgacggagac

SEQ ID NO: 28652 - DNA, 21 bp, Artificial Sequence
  source: /note="Description of Artificial Sequence: Synthetic oligonucleotide"
gcagcagcactcagcacaaaa

SEQ ID NO: 28653 - DNA, 21 bp, Artificial Sequence
  source: /note="Description of Artificial Sequence: Synthetic oligonucleotide"
gcagcagacgcaaacgtcaac

SEQ ID NO: 28654 - DNA, 21 bp, Artificial Sequence
  source: /note="Description of Artificial Sequence: Synthetic oligonucleotide"
gcagcagacttcaaaagagac

SEQ ID NO: 28655 - DNA, 21 bp, Artificial Sequence
  source: /note="Description of Artificial Sequence: Synthetic oligonucleotide"
gcagcagacaaaacaagcaga

SEQ ID NO: 28656 - DNA, 21 bp, Artificial Sequence
  source: /note="Description of Artificial Sequence: Synthetic oligonucleotide"
gcagcagacccaggaagcaga

SEQ ID NO: 28657 - DNA, 21 bp, Artificial Sequence
  source: /note="Description of Artificial Sequence: Synthetic oligonucleotide"
gcagcagacagagtcagacca

SEQ ID NO: 28658 - DNA, 21 bp, Artificial Sequence
  source: /note="Description of Artificial Sequence: Synthetic oligonucleotide"
gcagcattcatggtcgaaaga

SEQ ID NO: 28659 - DNA, 21 bp, Artificial Sequence
  source: /note="Description of Artificial Sequence: Synthetic oligonucleotide"
gcagcaggattcgcaacagac

SEQ ID NO: 28660 - DNA, 21 bp, Artificial Sequence
  source: /note="Description of Artificial Sequence: Synthetic oligonucleotide"
gcagcaggattccacctcagc

SEQ ID NO: 28661 - DNA, 21 bp, Artificial Sequence
  source: /note="Description of Artificial Sequence: Synthetic oligonucleotide"
gcagcaggaatgatcgcaagc

SEQ ID NO: 28662 - DNA, 21 bp, Artificial Sequence
  source: /note="Description of Artificial Sequence: Synthetic oligonucleotide"
gcagcaggaagcacacacatc

SEQ ID NO: 28663 - DNA, 21 bp, Artificial Sequence
  source: /note="Description of Artificial Sequence: Synthetic oligonucleotide"
gcagcacacgcaaacacagtc

SEQ ID NO: 28664 - DNA, 21 bp, Artificial Sequence
  source: /note="Description of Artificial Sequence: Synthetic oligonucleotide"
gcagcacacccacaactcttc

SEQ ID NO: 28665 - DNA, 21 bp, Artificial Sequence
  source: /note="Description of Artificial Sequence: Synthetic oligonucleotide"
gcagcacacagaacagcacac

SEQ ID NO: 28666 - DNA, 21 bp, Artificial Sequence
  source: /note="Description of Artificial Sequence: Synthetic oligonucleotide"
gcagcaatcggaaaagacgaa

SEQ ID NO: 28667 - DNA, 21 bp, Artificial Sequence
  source: /note="Description of Artificial Sequence: Synthetic oligonucleotide"
gcagcaatcagaagcagctac

SEQ ID NO: 28668 - DNA, 21 bp, Artificial Sequence
  source: /note="Description of Artificial Sequence: Synthetic oligonucleotide"
gcagcaaaaacaagccaactc

SEQ ID NO: 28669 - DNA, 21 bp, Artificial Sequence
  source: /note="Description of Artificial Sequence: Synthetic oligonucleotide"
gcagcactcccaacactcctc

SEQ ID NO: 28670 - DNA, 21 bp, Artificial Sequence
  source: /note="Description of Artificial Sequence: Synthetic oligonucleotide"
gcagcactcagccacctccac

SEQ ID NO: 28671 - DNA, 21 bp, Artificial Sequence
  source: /note="Description of Artificial Sequence: Synthetic oligonucleotide"
gcagcactcagcagagtcgac

SEQ ID NO: 28672 - DNA, 21 bp, Artificial Sequence
  source: /note="Description of Artificial Sequence: Synthetic oligonucleotide"
gcagcactcacaaaagtcctc

SEQ ID NO: 28673 - DNA, 21 bp, Artificial Sequence
  source: /note="Description of Artificial Sequence: Synthetic oligonucleotide"
gcagcactcacaagactcaca

SEQ ID NO: 28674 - DNA, 21 bp, Artificial Sequence
  source: /note="Description of Artificial Sequence: Synthetic oligonucleotide"
gcagcaatgatcaaaagacaa

SEQ ID NO: 28675 - DNA, 21 bp, Artificial Sequence
  source: /note="Description of Artificial Sequence: Synthetic oligonucleotide"
gcagcaatgatgaaaacagtc

SEQ ID NO: 28676 - DNA, 21 bp, Artificial Sequence
  source: /note="Description of Artificial Sequence: Synthetic oligonucleotide"
gcagcaatggtcagcacacca

SEQ ID NO: 28677 - DNA, 21 bp, Artificial Sequence
  source: /note="Description of Artificial Sequence: Synthetic oligonucleotide"
gcagcaaacctcagaacagga

SEQ ID NO: 28678 - DNA, 21 bp, Artificial Sequence
  source: /note="Description of Artificial Sequence: Synthetic oligonucleotide"
gcagcaaacctcgtcctccaa

SEQ ID NO: 28679 - DNA, 21 bp, Artificial Sequence
  source: /note="Description of Artificial Sequence: Synthetic oligonucleotide"
gcagcaaacagcacacaaagc

SEQ ID NO: 28680 - DNA, 21 bp, Artificial Sequence
  source: /note="Description of Artificial Sequence: Synthetic oligonucleotide"
gcagcaccaatcgcagcagca

SEQ ID NO: 28681 - DNA, 21 bp, Artificial Sequence
  source: /note="Description of Artificial Sequence: Synthetic oligonucleotide"
gcagcaccaccattcggacac

SEQ ID NO: 28682 - DNA, 21 bp, Artificial Sequence
  source: /note="Description of Artificial Sequence: Synthetic oligonucleotide"
gcagcaccaagcagcagcatc

SEQ ID NO: 28683 - DNA, 21 bp, Artificial Sequence
  source: /note="Description of Artificial Sequence: Synthetic oligonucleotide"
gcagcaccaagctacagagga

SEQ ID NO: 28684 - DNA, 21 bp, Artificial Sequence
  source: /note="Description of Artificial Sequence: Synthetic oligonucleotide"
gcagcaccaacaatcacacca

SEQ ID NO: 28685 - DNA, 21 bp, Artificial Sequence
  source: /note="Description of Artificial Sequence: Synthetic oligonucleotide"
gcagcacaactcggagaaaga

SEQ ID NO: 28686 - DNA, 21 bp, Artificial Sequence
  source: /note="Description of Artificial Sequence: Synthetic oligonucleotide"
gcagcacaaccatacacacac

SEQ ID NO: 28687 - DNA, 21 bp, Artificial Sequence
  source: /note="Description of Artificial Sequence: Synthetic oligonucleotide"
gcagcaagaccaccaaacgca

SEQ ID NO: 28688 - DNA, 21 bp, Artificial Sequence
  source: /note="Description of Artificial Sequence: Synthetic oligonucleotide"
gcagcaagaagcacagtcgtc

SEQ ID NO: 28689 - DNA, 21 bp, Artificial Sequence
  source: /note="Description of Artificial Sequence: Synthetic oligonucleotide"
gcagcaagaacaagcttcaac

SEQ ID NO: 28690 - DNA, 21 bp, Artificial Sequence
  source: /note="Description of Artificial Sequence: Synthetic oligonucleotide"
gcagcaagaacaacatacaca

SEQ ID NO: 28691 - DNA, 21 bp, Artificial Sequence
  source: /note="Description of Artificial Sequence: Synthetic oligonucleotide"
gcagcaagcgcaagcagatac

SEQ ID NO: 28692 - DNA, 21 bp, Artificial Sequence
  source: /note="Description of Artificial Sequence: Synthetic oligonucleotide"
gcagcaagcagcgacagctac

SEQ ID NO: 28693 - DNA, 21 bp, Artificial Sequence
  source: /note="Description of Artificial Sequence: Synthetic oligonucleotide"
gcagcaagctacgtcggaatc

SEQ ID NO: 28694 - DNA, 21 bp, Artificial Sequence
  source: /note="Description of Artificial Sequence: Synthetic oligonucleotide"
gcagcaacatgcggacaaaac

SEQ ID NO: 28695 - DNA, 21 bp, Artificial Sequence
  source: /note="Description of Artificial Sequence: Synthetic oligonucleotide"
gcagcaacactcgcaacagca

SEQ ID NO: 28696 - DNA, 21 bp, Artificial Sequence
  source: /note="Description of Artificial Sequence: Synthetic oligonucleotide"
gcagcaacaccaagcaaacac

SEQ ID NO: 28697 - DNA, 21 bp, Artificial Sequence
  source: /note="Description of Artificial Sequence: Synthetic oligonucleotide"
gcagcaacaagcctcaacagc

SEQ ID NO: 28698 - DNA, 21 bp, Artificial Sequence
  source: /note="Description of Artificial Sequence: Synthetic oligonucleotide"
gcagcagtcggagcaagcagc

SEQ ID NO: 28699 - DNA, 21 bp, Artificial Sequence
  source: /note="Description of Artificial Sequence: Synthetic oligonucleotide"
gcagcagtcggaggactcgga

SEQ ID NO: 28700 - DNA, 21 bp, Artificial Sequence
  source: /note="Description of Artificial Sequence: Synthetic oligonucleotide"
gcagcatgggcagacgaaagc

SEQ ID NO: 28701 - DNA, 21 bp, Artificial Sequence
  source: /note="Description of Artificial Sequence: Synthetic oligonucleotide"
gcagcatacagcttcagccca

SEQ ID NO: 28702 - DNA, 21 bp, Artificial Sequence
  source: /note="Description of Artificial Sequence: Synthetic oligonucleotide"
gcagacgcacacatgaacaga

SEQ ID NO: 28703 - DNA, 21 bp, Artificial Sequence
  source: /note="Description of Artificial Sequence: Synthetic oligonucleotide"
gcagacgaccaccacagccac

SEQ ID NO: 28704 - DNA, 21 bp, Artificial Sequence
  source: /note="Description of Artificial Sequence: Synthetic oligonucleotide"
gcagacgaagaagacagctgc

SEQ ID NO: 28705 - DNA, 21 bp, Artificial Sequence
  source: /note="Description of Artificial Sequence: Synthetic oligonucleotide"
gcagacggagacgtcccaaga

SEQ ID NO: 28706 - DNA, 21 bp, Artificial Sequence
  source: /note="Description of Artificial Sequence: Synthetic oligonucleotide"
gcagacggaaaaagcagcgac

SEQ ID NO: 28707 - DNA, 21 bp, Artificial Sequence
  source: /note="Description of Artificial Sequence: Synthetic oligonucleotide"
gcagacggaagcacaacactc

SEQ ID NO: 28708 - DNA, 21 bp, Artificial Sequence
  source: /note="Description of Artificial Sequence: Synthetic oligonucleotide"
gcagaccacgtcccatacatc

SEQ ID NO: 28709 - DNA, 21 bp, Artificial Sequence
  source: /note="Description of Artificial Sequence: Synthetic oligonucleotide"
gcagacaaactcggacacaca

SEQ ID NO: 28710 - DNA, 21 bp, Artificial Sequence
  source: /note="Description of Artificial Sequence: Synthetic oligonucleotide"
gcagacaaaccaagcgacaga

SEQ ID NO: 28711 - DNA, 21 bp, Artificial Sequence
  source: /note="Description of Artificial Sequence: Synthetic oligonucleotide"
gcagacaaaagcagagtcgga

SEQ ID NO: 28712 - DNA, 21 bp, Artificial Sequence
  source: /note="Description of Artificial Sequence: Synthetic oligonucleotide"
gcagacaaagtcagactcgtc

SEQ ID NO: 28713 - DNA, 21 bp, Artificial Sequence
  source: /note="Description of Artificial Sequence: Synthetic oligonucleotide"
gcagacctcgcaatcagcgtc

SEQ ID NO: 28714 - DNA, 21 bp, Artificial Sequence
  source: /note="Description of Artificial Sequence: Synthetic oligonucleotide"
gcagacctcctcccaagcaca

SEQ ID NO: 28715 - DNA, 21 bp, Artificial Sequence
  source: /note="Description of Artificial Sequence: Synthetic oligonucleotide"
gcagacctcagcccaacagaa

SEQ ID NO: 28716 - DNA, 21 bp, Artificial Sequence
  source: /note="Description of Artificial Sequence: Synthetic oligonucleotide"
gcagacctctacacaagacca

SEQ ID NO: 28717 - DNA, 21 bp, Artificial Sequence
  source: /note="Description of Artificial Sequence: Synthetic oligonucleotide"
gcagacatgagaagcagcgca

SEQ ID NO: 28718 - DNA, 21 bp, Artificial Sequence
  source: /note="Description of Artificial Sequence: Synthetic oligonucleotide"
gcagacaaccaagtcccactc

SEQ ID NO: 28719 - DNA, 21 bp, Artificial Sequence
  source: /note="Description of Artificial Sequence: Synthetic oligonucleotide"
gcagacccagaaggagcaagc

SEQ ID NO: 28720 - DNA, 21 bp, Artificial Sequence
  source: /note="Description of Artificial Sequence: Synthetic oligonucleotide"
gcagacccagaaagagtcaga

SEQ ID NO: 28721 - DNA, 21 bp, Artificial Sequence
  source: /note="Description of Artificial Sequence: Synthetic oligonucleotide"
gcagacccacacatgccaaaa

SEQ ID NO: 28722 - DNA, 21 bp, Artificial Sequence
  source: /note="Description of Artificial Sequence: Synthetic oligonucleotide"
gcagacccacacagaaaccaa

SEQ ID NO: 28723 - DNA, 21 bp, Artificial Sequence
  source: /note="Description of Artificial Sequence: Synthetic oligonucleotide"
gcagacccaatgcacagagca

SEQ ID NO: 28724 - DNA, 21 bp, Artificial Sequence
  source: /note="Description of Artificial Sequence: Synthetic oligonucleotide"
gcagacccaccaaaattctgg

SEQ ID NO: 28725 - DNA, 21 bp, Artificial Sequence
  source: /note="Description of Artificial Sequence: Synthetic oligonucleotide"
gcagacccaagacaaaaaagc

SEQ ID NO: 28726 - DNA, 21 bp, Artificial Sequence
  source: /note="Description of Artificial Sequence: Synthetic oligonucleotide"
gcagacagagcacacgcagtc

SEQ ID NO: 28727 - DNA, 21 bp, Artificial Sequence
  source: /note="Description of Artificial Sequence: Synthetic oligonucleotide"
gcagacagaggaagccacagc

SEQ ID NO: 28728 - DNA, 21 bp, Artificial Sequence
  source: /note="Description of Artificial Sequence: Synthetic oligonucleotide"
gcagacagactcccattcctc

SEQ ID NO: 28729 - DNA, 21 bp, Artificial Sequence
  source: /note="Description of Artificial Sequence: Synthetic oligonucleotide"
gcagacagaagcccaatcaca

SEQ ID NO: 28730 - DNA, 21 bp, Artificial Sequence
  source: /note="Description of Artificial Sequence: Synthetic oligonucleotide"
gcagacagatacggaagagtc

SEQ ID NO: 28731 - DNA, 21 bp, Artificial Sequence
  source: /note="Description of Artificial Sequence: Synthetic oligonucleotide"
gcagacagcggaagaacaatc

SEQ ID NO: 28732 - DNA, 21 bp, Artificial Sequence
  source: /note="Description of Artificial Sequence: Synthetic oligonucleotide"
gcagacagcacacacgcagca

SEQ ID NO: 28733 - DNA, 21 bp, Artificial Sequence
  source: /note="Description of Artificial Sequence: Synthetic oligonucleotide"
gcagacacaatgacaagcagc

SEQ ID NO: 28734 - DNA, 21 bp, Artificial Sequence
  source: /note="Description of Artificial Sequence: Synthetic oligonucleotide"
gcagacacaatgacaacagtc

SEQ ID NO: 28735 - DNA, 21 bp, Artificial Sequence
  source: /note="Description of Artificial Sequence: Synthetic oligonucleotide"
gcagacacaagactccacagc

SEQ ID NO: 28736 - DNA, 21 bp, Artificial Sequence
  source: /note="Description of Artificial Sequence: Synthetic oligonucleotide"
gcagacacaagactccaaaca

SEQ ID NO: 28737 - DNA, 21 bp, Artificial Sequence
  source: /note="Description of Artificial Sequence: Synthetic oligonucleotide"
gcagacgtcagaacactcagc

SEQ ID NO: 28738 - DNA, 21 bp, Artificial Sequence
  source: /note="Description of Artificial Sequence: Synthetic oligonucleotide"
gcagaagcaggaatgttcgac

SEQ ID NO: 28739 - DNA, 21 bp, Artificial Sequence
  source: /note="Description of Artificial Sequence: Synthetic oligonucleotide"
gcagaagcaaaaaacacaaga

SEQ ID NO: 28740 - DNA, 21 bp, Artificial Sequence
  source: /note="Description of Artificial Sequence: Synthetic oligonucleotide"
gcagaagcaccaacaagagac

SEQ ID NO: 28741 - DNA, 21 bp, Artificial Sequence
  source: /note="Description of Artificial Sequence: Synthetic oligonucleotide"
gcagaagcaacaagcgtcgaa

SEQ ID NO: 28742 - DNA, 21 bp, Artificial Sequence
  source: /note="Description of Artificial Sequence: Synthetic oligonucleotide"
gcagaaggaaacccaaaaatc

SEQ ID NO: 28743 - DNA, 21 bp, Artificial Sequence
  source: /note="Description of Artificial Sequence: Synthetic oligonucleotide"
gcagaaggaccagaatggaga

SEQ ID NO: 28744 - DNA, 21 bp, Artificial Sequence
  source: /note="Description of Artificial Sequence: Synthetic oligonucleotide"
gcagaacacccaaacagcctc

SEQ ID NO: 28745 - DNA, 21 bp, Artificial Sequence
  source: /note="Description of Artificial Sequence: Synthetic oligonucleotide"
gcagaacacagcccaagcctc

SEQ ID NO: 28746 - DNA, 21 bp, Artificial Sequence
  source: /note="Description of Artificial Sequence: Synthetic oligonucleotide"
gcagaaatcgtcagacacgtc

SEQ ID NO: 28747 - DNA, 21 bp, Artificial Sequence
  source: /note="Description of Artificial Sequence: Synthetic oligonucleotide"
gcagaactcgcaagcccaatc

SEQ ID NO: 28748 - DNA, 21 bp, Artificial Sequence
  source: /note="Description of Artificial Sequence: Synthetic oligonucleotide"
gcagaactcaaaagaggacca

SEQ ID NO: 28749 - DNA, 21 bp, Artificial Sequence
  source: /note="Description of Artificial Sequence: Synthetic oligonucleotide"
gcagaactcccaccaagacaa

SEQ ID NO: 28750 - DNA, 21 bp, Artificial Sequence
  source: /note="Description of Artificial Sequence: Synthetic oligonucleotide"
gcagaactccaaccacacctc

SEQ ID NO: 28751 - DNA, 21 bp, Artificial Sequence
  source: /note="Description of Artificial Sequence: Synthetic oligonucleotide"
gcagaaccaagaagctggagc

SEQ ID NO: 28752 - DNA, 21 bp, Artificial Sequence
  source: /note="Description of Artificial Sequence: Synthetic oligonucleotide"
gcagaaccaacagacttcctc

SEQ ID NO: 28753 - DNA, 21 bp, Artificial Sequence
  source: /note="Description of Artificial Sequence: Synthetic oligonucleotide"
gcagaaagagcaacatggagc

SEQ ID NO: 28754 - DNA, 21 bp, Artificial Sequence
  source: /note="Description of Artificial Sequence: Synthetic oligonucleotide"
gcagaaagaaacatggcacca

SEQ ID NO: 28755 - DNA, 21 bp, Artificial Sequence
  source: /note="Description of Artificial Sequence: Synthetic oligonucleotide"
gcagaaagacaacaatacctc

SEQ ID NO: 28756 - DNA, 21 bp, Artificial Sequence
  source: /note="Description of Artificial Sequence: Synthetic oligonucleotide"
gcagaaagcgcatacgtccca

SEQ ID NO: 28757 - DNA, 21 bp, Artificial Sequence
  source: /note="Description of Artificial Sequence: Synthetic oligonucleotide"
gcagaaacaagcagcagcagc

SEQ ID NO: 28758 - DNA, 21 bp, Artificial Sequence
  source: /note="Description of Artificial Sequence: Synthetic oligonucleotide"
gcattcgcaggagtcagagga

SEQ ID NO: 28759 - DNA, 21 bp, Artificial Sequence
  source: /note="Description of Artificial Sequence: Synthetic oligonucleotide"
gcattcgcaagaagcgcacca

SEQ ID NO: 28760 - DNA, 21 bp, Artificial Sequence
  source: /note="Description of Artificial Sequence: Synthetic oligonucleotide"
gcattcgacacaagaggagga

SEQ ID NO: 28761 - DNA, 21 bp, Artificial Sequence
  source: /note="Description of Artificial Sequence: Synthetic oligonucleotide"
gcattcgaaggaagaagccca

SEQ ID NO: 28762 - DNA, 21 bp, Artificial Sequence
  source: /note="Description of Artificial Sequence: Synthetic oligonucleotide"
gcattcgaaagcccaagagca

SEQ ID NO: 28763 - DNA, 21 bp, Artificial Sequence
  source: /note="Description of Artificial Sequence: Synthetic oligonucleotide"
gcattcggagcaagcatgagc

SEQ ID NO: 28764 - DNA, 21 bp, Artificial Sequence
  source: /note="Description of Artificial Sequence: Synthetic oligonucleotide"
gcattcggaaaaggacacaca

SEQ ID NO: 28765 - DNA, 21 bp, Artificial Sequence
  source: /note="Description of Artificial Sequence: Synthetic oligonucleotide"
gcattcggaaaaaacacagtc

SEQ ID NO: 28766 - DNA, 21 bp, Artificial Sequence
  source: /note="Description of Artificial Sequence: Synthetic oligonucleotide"
gcattcggaacactcaaaatg

SEQ ID NO: 28767 - DNA, 21 bp, Artificial Sequence
  source: /note="Description of Artificial Sequence: Synthetic oligonucleotide"
gcattcctcgcagcaaacgca

SEQ ID NO: 28768 - DNA, 21 bp, Artificial Sequence
  source: /note="Description of Artificial Sequence: Synthetic oligonucleotide"
gcattcctcaaccaactcagc

SEQ ID NO: 28769 - DNA, 21 bp, Artificial Sequence
  source: /note="Description of Artificial Sequence: Synthetic oligonucleotide"
gcattcctcagcagcgcacca

SEQ ID NO: 28770 - DNA, 21 bp, Artificial Sequence
  source: /note="Description of Artificial Sequence: Synthetic oligonucleotide"
gcattcatgagcaaactcgaa

SEQ ID NO: 28771 - DNA, 21 bp, Artificial Sequence
  source: /note="Description of Artificial Sequence: Synthetic oligonucleotide"
gcattcaacggaacagacagc

SEQ ID NO: 28772 - DNA, 21 bp, Artificial Sequence
  source: /note="Description of Artificial Sequence: Synthetic oligonucleotide"
gcattcaaccacgaactcagc

SEQ ID NO: 28773 - DNA, 21 bp, Artificial Sequence
  source: /note="Description of Artificial Sequence: Synthetic oligonucleotide"
gcattcaacacaagccacgac

SEQ ID NO: 28774 - DNA, 21 bp, Artificial Sequence
  source: /note="Description of Artificial Sequence: Synthetic oligonucleotide"
gcattcccactcccaccacac

SEQ ID NO: 28775 - DNA, 21 bp, Artificial Sequence
  source: /note="Description of Artificial Sequence: Synthetic oligonucleotide"
gcattcccacaaagcggaaac

SEQ ID NO: 28776 - DNA, 21 bp, Artificial Sequence
  source: /note="Description of Artificial Sequence: Synthetic oligonucleotide"
gcattccaagacaaacaaaca

SEQ ID NO: 28777 - DNA, 21 bp, Artificial Sequence
  source: /note="Description of Artificial Sequence: Synthetic oligonucleotide"
gcattccaacaccaaccacca

SEQ ID NO: 28778 - DNA, 21 bp, Artificial Sequence
  source: /note="Description of Artificial Sequence: Synthetic oligonucleotide"
gcattccaaagcgcaagagca

SEQ ID NO: 28779 - DNA, 21 bp, Artificial Sequence
  source: /note="Description of Artificial Sequence: Synthetic oligonucleotide"
gcattcagcaacgcaggacca

SEQ ID NO: 28780 - DNA, 21 bp, Artificial Sequence
  source: /note="Description of Artificial Sequence: Synthetic oligonucleotide"
gcattcagcacaacagtcatg

SEQ ID NO: 28781 - DNA, 21 bp, Artificial Sequence
  source: /note="Description of Artificial Sequence: Synthetic oligonucleotide"
gcattcacaggaaaaagcagc

SEQ ID NO: 28782 - DNA, 21 bp, Artificial Sequence
  source: /note="Description of Artificial Sequence: Synthetic oligonucleotide"
gcattcgtcgcaagcagccca

SEQ ID NO: 28783 - DNA, 21 bp, Artificial Sequence
  source: /note="Description of Artificial Sequence: Synthetic oligonucleotide"
gcattcgtcggaaaagtcaca

SEQ ID NO: 28784 - DNA, 21 bp, Artificial Sequence
  source: /note="Description of Artificial Sequence: Synthetic oligonucleotide"
gcattcgtcccaaaaagcatg

SEQ ID NO: 28785 - DNA, 21 bp, Artificial Sequence
  source: /note="Description of Artificial Sequence: Synthetic oligonucleotide"
gcaggagcagaagaacacatg

SEQ ID NO: 28786 - DNA, 21 bp, Artificial Sequence
  source: /note="Description of Artificial Sequence: Synthetic oligonucleotide"
gcaggagcactcatgcacctc

SEQ ID NO: 28787 - DNA, 21 bp, Artificial Sequence
  source: /note="Description of Artificial Sequence: Synthetic oligonucleotide"
gcaggagcaccaacaggactc

SEQ ID NO: 28788 - DNA, 21 bp, Artificial Sequence
  source: /note="Description of Artificial Sequence: Synthetic oligonucleotide"
gcaggagcaacaagcttctac

SEQ ID NO: 28789 - DNA, 21 bp, Artificial Sequence
  source: /note="Description of Artificial Sequence: Synthetic oligonucleotide"
gcaggaggagcaggacaaatg

SEQ ID NO: 28790 - DNA, 21 bp, Artificial Sequence
  source: /note="Description of Artificial Sequence: Synthetic oligonucleotide"
gcaggaggacaaccaagcctc

SEQ ID NO: 28791 - DNA, 21 bp, Artificial Sequence
  source: /note="Description of Artificial Sequence: Synthetic oligonucleotide"
gcaggaggaagctggccagca

SEQ ID NO: 28792 - DNA, 21 bp, Artificial Sequence
  source: /note="Description of Artificial Sequence: Synthetic oligonucleotide"
gcaggaggaacaagcatgcca

SEQ ID NO: 28793 - DNA, 21 bp, Artificial Sequence
  source: /note="Description of Artificial Sequence: Synthetic oligonucleotide"
gcaggaggatacctcgtccca

SEQ ID NO: 28794 - DNA, 21 bp, Artificial Sequence
  source: /note="Description of Artificial Sequence: Synthetic oligonucleotide"
gcaggacacagagcagacagc

SEQ ID NO: 28795 - DNA, 21 bp, Artificial Sequence
  source: /note="Description of Artificial Sequence: Synthetic oligonucleotide"
gcaggacacacaaacctccca

SEQ ID NO: 28796 - DNA, 21 bp, Artificial Sequence
  source: /note="Description of Artificial Sequence: Synthetic oligonucleotide"
gcaggacacgtcgtcagcatg

SEQ ID NO: 28797 - DNA, 21 bp, Artificial Sequence
  source: /note="Description of Artificial Sequence: Synthetic oligonucleotide"
gcaggaatcacaacagcagtc

SEQ ID NO: 28798 - DNA, 21 bp, Artificial Sequence
  source: /note="Description of Artificial Sequence: Synthetic oligonucleotide"
gcaggaaaagcaacatacatc

SEQ ID NO: 28799 - DNA, 21 bp, Artificial Sequence
  source: /note="Description of Artificial Sequence: Synthetic oligonucleotide"
gcaggaaaactcgtcagcagc

SEQ ID NO: 28800 - DNA, 21 bp, Artificial Sequence
  source: /note="Description of Artificial Sequence: Synthetic oligonucleotide"
gcaggactcgcagtcaaacca

SEQ ID NO: 28801 - DNA, 21 bp, Artificial Sequence
  source: /note="Description of Artificial Sequence: Synthetic oligonucleotide"
gcaggactcgacttctaccca

SEQ ID NO: 28802 - DNA, 21 bp, Artificial Sequence
  source: /note="Description of Artificial Sequence: Synthetic oligonucleotide"
gcaggactcaaagacgtcaca

SEQ ID NO: 28803 - DNA, 21 bp, Artificial Sequence
  source: /note="Description of Artificial Sequence: Synthetic oligonucleotide"
gcaggactcctcacacaaatc

SEQ ID NO: 28804 - DNA, 21 bp, Artificial Sequence
  source: /note="Description of Artificial Sequence: Synthetic oligonucleotide"
gcaggactcaacggacaagga

SEQ ID NO: 28805 - DNA, 21 bp, Artificial Sequence
  source: /note="Description of Artificial Sequence: Synthetic oligonucleotide"
gcaggactcaaccacagcgtc

SEQ ID NO: 28806 - DNA, 21 bp, Artificial Sequence
  source: /note="Description of Artificial Sequence: Synthetic oligonucleotide"
gcaggactccaacaactcagc

SEQ ID NO: 28807 - DNA, 21 bp, Artificial Sequence
  source: /note="Description of Artificial Sequence: Synthetic oligonucleotide"
gcaggaatggacagcaacgac

SEQ ID NO: 28808 - DNA, 21 bp, Artificial Sequence
  source: /note="Description of Artificial Sequence: Synthetic oligonucleotide"
gcaggaatgcacagcatgaca

SEQ ID NO: 28809 - DNA, 21 bp, Artificial Sequence
  source: /note="Description of Artificial Sequence: Synthetic oligonucleotide"
gcaggaatgccaccagcacca

SEQ ID NO: 28810 - DNA, 21 bp, Artificial Sequence
  source: /note="Description of Artificial Sequence: Synthetic oligonucleotide"
gcaggaaaccacgcagtccaa

SEQ ID NO: 28811 - DNA, 21 bp, Artificial Sequence
  source: /note="Description of Artificial Sequence: Synthetic oligonucleotide"
gcaggaaacagcaaaacaagc

SEQ ID NO: 28812 - DNA, 21 bp, Artificial Sequence
  source: /note="Description of Artificial Sequence: Synthetic oligonucleotide"
gcaggaaacagcctcagcagc

SEQ ID NO: 28813 - DNA, 21 bp, Artificial Sequence
  source: /note="Description of Artificial Sequence: Synthetic oligonucleotide"
gcaggaccacacgtcctcgca

SEQ ID NO: 28814 - DNA, 21 bp, Artificial Sequence
  source: /note="Description of Artificial Sequence: Synthetic oligonucleotide"
gcaggaccaagcaacttcgac

SEQ ID NO: 28815 - DNA, 21 bp, Artificial Sequence
  source: /note="Description of Artificial Sequence: Synthetic oligonucleotide"
gcaggaccaacaaacccattc

SEQ ID NO: 28816 - DNA, 21 bp, Artificial Sequence
  source: /note="Description of Artificial Sequence: Synthetic oligonucleotide"
gcaggacaattcacaaaaagc

SEQ ID NO: 28817 - DNA, 21 bp, Artificial Sequence
  source: /note="Description of Artificial Sequence: Synthetic oligonucleotide"
gcaggacaaggaagccaaagc

SEQ ID NO: 28818 - DNA, 21 bp, Artificial Sequence
  source: /note="Description of Artificial Sequence: Synthetic oligonucleotide"
gcaggacaaaacagcctcgtc

SEQ ID NO: 28819 - DNA, 21 bp, Artificial Sequence
  source: /note="Description of Artificial Sequence: Synthetic oligonucleotide"
gcaggacaaagcgcaccaaga

SEQ ID NO: 28820 - DNA, 21 bp, Artificial Sequence
  source: /note="Description of Artificial Sequence: Synthetic oligonucleotide"
gcaggaagagacagcgcatgg

SEQ ID NO: 28821 - DNA, 21 bp, Artificial Sequence
  source: /note="Description of Artificial Sequence: Synthetic oligonucleotide"
gcaggaagaaacatgcaccca

SEQ ID NO: 28822 - DNA, 21 bp, Artificial Sequence
  source: /note="Description of Artificial Sequence: Synthetic oligonucleotide"
gcaggaagaccaccacaaagc

SEQ ID NO: 28823 - DNA, 21 bp, Artificial Sequence
  source: /note="Description of Artificial Sequence: Synthetic oligonucleotide"
gcaggaagagtcctcacaatg

SEQ ID NO: 28824 - DNA, 21 bp, Artificial Sequence
  source: /note="Description of Artificial Sequence: Synthetic oligonucleotide"
gcaggaagcggaggaagccca

SEQ ID NO: 28825 - DNA, 21 bp, Artificial Sequence
  source: /note="Description of Artificial Sequence: Synthetic oligonucleotide"
gcaggaagcggagtcctcaac

SEQ ID NO: 28826 - DNA, 21 bp, Artificial Sequence
  source: /note="Description of Artificial Sequence: Synthetic oligonucleotide"
gcaggaagccaccaaagcgaa

SEQ ID NO: 28827 - DNA, 21 bp, Artificial Sequence
  source: /note="Description of Artificial Sequence: Synthetic oligonucleotide"
gcaggaagcatcatcagcaga

SEQ ID NO: 28828 - DNA, 21 bp, Artificial Sequence
  source: /note="Description of Artificial Sequence: Synthetic oligonucleotide"
gcaggaagcctcagcgtcgac

SEQ ID NO: 28829 - DNA, 21 bp, Artificial Sequence
  source: /note="Description of Artificial Sequence: Synthetic oligonucleotide"
gcaggaagccaacacccagca

SEQ ID NO: 28830 - DNA, 21 bp, Artificial Sequence
  source: /note="Description of Artificial Sequence: Synthetic oligonucleotide"
gcaggaagccaaacaccacca

SEQ ID NO: 28831 - DNA, 21 bp, Artificial Sequence
  source: /note="Description of Artificial Sequence: Synthetic oligonucleotide"
gcaggaagcagcagaacattc

SEQ ID NO: 28832 - DNA, 21 bp, Artificial Sequence
  source: /note="Description of Artificial Sequence: Synthetic oligonucleotide"
gcaggaacaggactcggaatg

SEQ ID NO: 28833 - DNA, 21 bp, Artificial Sequence
  source: /note="Description of Artificial Sequence: Synthetic oligonucleotide"
gcaggaacaggaccattcgca

SEQ ID NO: 28834 - DNA, 21 bp, Artificial Sequence
  source: /note="Description of Artificial Sequence: Synthetic oligonucleotide"
gcaggaacaatcagaatcagc

SEQ ID NO: 28835 - DNA, 21 bp, Artificial Sequence
  source: /note="Description of Artificial Sequence: Synthetic oligonucleotide"
gcaggaacactcgtcatcatg

SEQ ID NO: 28836 - DNA, 21 bp, Artificial Sequence
  source: /note="Description of Artificial Sequence: Synthetic oligonucleotide"
gcaggaacaaaccaaagaaac

SEQ ID NO: 28837 - DNA, 21 bp, Artificial Sequence
  source: /note="Description of Artificial Sequence: Synthetic oligonucleotide"
gcaggaacacaaccaatgaca

SEQ ID NO: 28838 - DNA, 21 bp, Artificial Sequence
  source: /note="Description of Artificial Sequence: Synthetic oligonucleotide"
gcaggaacacaaagagcatac

SEQ ID NO: 28839 - DNA, 21 bp, Artificial Sequence
  source: /note="Description of Artificial Sequence: Synthetic oligonucleotide"
gcaggaacaagccacagccac

SEQ ID NO: 28840 - DNA, 21 bp, Artificial Sequence
  source: /note="Description of Artificial Sequence: Synthetic oligonucleotide"
gcaggaacagtcgaacacctc

SEQ ID NO: 28841 - DNA, 21 bp, Artificial Sequence
  source: /note="Description of Artificial Sequence: Synthetic oligonucleotide"
gcaggagtcggaaaagcacaa

SEQ ID NO: 28842 - DNA, 21 bp, Artificial Sequence
  source: /note="Description of Artificial Sequence: Synthetic oligonucleotide"
gcaggagtcctcaaaatgagc

SEQ ID NO: 28843 - DNA, 21 bp, Artificial Sequence
  source: /note="Description of Artificial Sequence: Synthetic oligonucleotide"
gcaggagtcccaagaatggaa

SEQ ID NO: 28844 - DNA, 21 bp, Artificial Sequence
  source: /note="Description of Artificial Sequence: Synthetic oligonucleotide"
gcaggagtcccaagcccagca

SEQ ID NO: 28845 - DNA, 21 bp, Artificial Sequence
  source: /note="Description of Artificial Sequence: Synthetic oligonucleotide"
gcaggagtccaaccaggacaa

SEQ ID NO: 28846 - DNA, 21 bp, Artificial Sequence
  source: /note="Description of Artificial Sequence: Synthetic oligonucleotide"
gcaggagtcagcgaagcaatc

SEQ ID NO: 28847 - DNA, 21 bp, Artificial Sequence
  source: /note="Description of Artificial Sequence: Synthetic oligonucleotide"
gcacacgcagtcagcctccaa

SEQ ID NO: 28848 - DNA, 21 bp, Artificial Sequence
  source: /note="Description of Artificial Sequence: Synthetic oligonucleotide"
gcacacgacgaagtcccatac

SEQ ID NO: 28849 - DNA, 21 bp, Artificial Sequence
  source: /note="Description of Artificial Sequence: Synthetic oligonucleotide"
gcacacgacatcccaatgagc

SEQ ID NO: 28850 - DNA, 21 bp, Artificial Sequence
  source: /note="Description of Artificial Sequence: Synthetic oligonucleotide"
gcacacgacaacaaaagcatg

SEQ ID NO: 28851 - DNA, 21 bp, Artificial Sequence
  source: /note="Description of Artificial Sequence: Synthetic oligonucleotide"
gcacacgaagtcctcagcttc

SEQ ID NO: 28852 - DNA, 21 bp, Artificial Sequence
  source: /note="Description of Artificial Sequence: Synthetic oligonucleotide"
gcacacggagaaagcaaacca

SEQ ID NO: 28853 - DNA, 21 bp, Artificial Sequence
  source: /note="Description of Artificial Sequence: Synthetic oligonucleotide"
gcacacggaaacgcaccaagc

SEQ ID NO: 28854 - DNA, 21 bp, Artificial Sequence
  source: /note="Description of Artificial Sequence: Synthetic oligonucleotide"
gcacacggaaacagcagcctc

SEQ ID NO: 28855 - DNA, 21 bp, Artificial Sequence
  source: /note="Description of Artificial Sequence: Synthetic oligonucleotide"
gcacacggaagcctccaagtc

SEQ ID NO: 28856 - DNA, 21 bp, Artificial Sequence
  source: /note="Description of Artificial Sequence: Synthetic oligonucleotide"
gcacacggagtcgcatacatc

SEQ ID NO: 28857 - DNA, 21 bp, Artificial Sequence
  source: /note="Description of Artificial Sequence: Synthetic oligonucleotide"
gcacacggagtcaaaacaagc

SEQ ID NO: 28858 - DNA, 21 bp, Artificial Sequence
  source: /note="Description of Artificial Sequence: Synthetic oligonucleotide"
gcacaccacagcgtcccacca

SEQ ID NO: 28859 - DNA, 21 bp, Artificial Sequence
  source: /note="Description of Artificial Sequence: Synthetic oligonucleotide"
gcacacatcgcaagacacgga

SEQ ID NO: 28860 - DNA, 21 bp, Artificial Sequence
  source: /note="Description of Artificial Sequence: Synthetic oligonucleotide"
gcacacaaaagcctcccactc

SEQ ID NO: 28861 - DNA, 21 bp, Artificial Sequence
  source: /note="Description of Artificial Sequence: Synthetic oligonucleotide"
gcacacctcaaatacggaagc

SEQ ID NO: 28862 - DNA, 21 bp, Artificial Sequence
  source: /note="Description of Artificial Sequence: Synthetic oligonucleotide"
gcacacatggacagaacaagc

SEQ ID NO: 28863 - DNA, 21 bp, Artificial Sequence
  source: /note="Description of Artificial Sequence: Synthetic oligonucleotide"
gcacacatgacagacggagaa

SEQ ID NO: 28864 - DNA, 21 bp, Artificial Sequence
  source: /note="Description of Artificial Sequence: Synthetic oligonucleotide"
gcacacaacgtccaaggagca

SEQ ID NO: 28865 - DNA, 21 bp, Artificial Sequence
  source: /note="Description of Artificial Sequence: Synthetic oligonucleotide"
gcacacccaccacaaccagga

SEQ ID NO: 28866 - DNA, 21 bp, Artificial Sequence
  source: /note="Description of Artificial Sequence: Synthetic oligonucleotide"
gcacacccaagcctcccactc

SEQ ID NO: 28867 - DNA, 21 bp, Artificial Sequence
  source: /note="Description of Artificial Sequence: Synthetic oligonucleotide"
gcacacccaagcagaggaatc

SEQ ID NO: 28868 - DNA, 21 bp, Artificial Sequence
  source: /note="Description of Artificial Sequence: Synthetic oligonucleotide"
gcacacccaagcagccacgga

SEQ ID NO: 28869 - DNA, 21 bp, Artificial Sequence
  source: /note="Description of Artificial Sequence: Synthetic oligonucleotide"
gcacaccaagtcggactcgca

SEQ ID NO: 28870 - DNA, 21 bp, Artificial Sequence
  source: /note="Description of Artificial Sequence: Synthetic oligonucleotide"
gcacacagccacgtcccacca

SEQ ID NO: 28871 - DNA, 21 bp, Artificial Sequence
  source: /note="Description of Artificial Sequence: Synthetic oligonucleotide"
gcacacagcctcaaacaagtc

SEQ ID NO: 28872 - DNA, 21 bp, Artificial Sequence
  source: /note="Description of Artificial Sequence: Synthetic oligonucleotide"
gcacacagcccagcactcgtc

SEQ ID NO: 28873 - DNA, 21 bp, Artificial Sequence
  source: /note="Description of Artificial Sequence: Synthetic oligonucleotide"
gcacacagcagaagcggacca

SEQ ID NO: 28874 - DNA, 21 bp, Artificial Sequence
  source: /note="Description of Artificial Sequence: Synthetic oligonucleotide"
gcacacacactcacagaacca

SEQ ID NO: 28875 - DNA, 21 bp, Artificial Sequence
  source: /note="Description of Artificial Sequence: Synthetic oligonucleotide"
gcacacacaaacctcacaagc

SEQ ID NO: 28876 - DNA, 21 bp, Artificial Sequence
  source: /note="Description of Artificial Sequence: Synthetic oligonucleotide"
gcacacacaagaatcatgcca

SEQ ID NO: 28877 - DNA, 21 bp, Artificial Sequence
  source: /note="Description of Artificial Sequence: Synthetic oligonucleotide"
gcacacgtcaacagcttcagc

SEQ ID NO: 28878 - DNA, 21 bp, Artificial Sequence
  source: /note="Description of Artificial Sequence: Synthetic oligonucleotide"
gcacacgtcccagcagcagac

SEQ ID NO: 28879 - DNA, 21 bp, Artificial Sequence
  source: /note="Description of Artificial Sequence: Synthetic oligonucleotide"
gcacacgtcagccaaagcgga

SEQ ID NO: 28880 - DNA, 21 bp, Artificial Sequence
  source: /note="Description of Artificial Sequence: Synthetic oligonucleotide"
gcaatcgcattcagaagagaa

SEQ ID NO: 28881 - DNA, 21 bp, Artificial Sequence
  source: /note="Description of Artificial Sequence: Synthetic oligonucleotide"
gcaatcgcaccaccatacaca

SEQ ID NO: 28882 - DNA, 21 bp, Artificial Sequence
  source: /note="Description of Artificial Sequence: Synthetic oligonucleotide"
gcaatcgcagtcagcgcagga

SEQ ID NO: 28883 - DNA, 21 bp, Artificial Sequence
  source: /note="Description of Artificial Sequence: Synthetic oligonucleotide"
gcaatcgacagcggataccac

SEQ ID NO: 28884 - DNA, 21 bp, Artificial Sequence
  source: /note="Description of Artificial Sequence: Synthetic oligonucleotide"
gcaatcggagcaatcggaagc

SEQ ID NO: 28885 - DNA, 21 bp, Artificial Sequence
  source: /note="Description of Artificial Sequence: Synthetic oligonucleotide"
gcaatcggaccaagaggagga

SEQ ID NO: 28886 - DNA, 21 bp, Artificial Sequence
  source: /note="Description of Artificial Sequence: Synthetic oligonucleotide"
gcaatcggaagcacaacaagc

SEQ ID NO: 28887 - DNA, 21 bp, Artificial Sequence
  source: /note="Description of Artificial Sequence: Synthetic oligonucleotide"
gcaatccacgcagtcagccca

SEQ ID NO: 28888 - DNA, 21 bp, Artificial Sequence
  source: /note="Description of Artificial Sequence: Synthetic oligonucleotide"
gcaatccacagcacaaaaagc

SEQ ID NO: 28889 - DNA, 21 bp, Artificial Sequence
  source: /note="Description of Artificial Sequence: Synthetic oligonucleotide"
gcaatcaaaggacaagacctc

SEQ ID NO: 28890 - DNA, 21 bp, Artificial Sequence
  source: /note="Description of Artificial Sequence: Synthetic oligonucleotide"
gcaatcaacttccaagcagga

SEQ ID NO: 28891 - DNA, 21 bp, Artificial Sequence
  source: /note="Description of Artificial Sequence: Synthetic oligonucleotide"
gcaatcaaccacgcaatgaca

SEQ ID NO: 28892 - DNA, 21 bp, Artificial Sequence
  source: /note="Description of Artificial Sequence: Synthetic oligonucleotide"
gcaatcccaggacacatcatg

SEQ ID NO: 28893 - DNA, 21 bp, Artificial Sequence
  source: /note="Description of Artificial Sequence: Synthetic oligonucleotide"
gcaatcccaggaagcagcaga

SEQ ID NO: 28894 - DNA, 21 bp, Artificial Sequence
  source: /note="Description of Artificial Sequence: Synthetic oligonucleotide"
gcaatcccaatgacacacgac

SEQ ID NO: 28895 - DNA, 21 bp, Artificial Sequence
  source: /note="Description of Artificial Sequence: Synthetic oligonucleotide"
gcaatcccaaacccactcgac

SEQ ID NO: 28896 - DNA, 21 bp, Artificial Sequence
  source: /note="Description of Artificial Sequence: Synthetic oligonucleotide"
gcaatcagaaacgtcctcgca

SEQ ID NO: 28897 - DNA, 21 bp, Artificial Sequence
  source: /note="Description of Artificial Sequence: Synthetic oligonucleotide"
gcaatcagaagcgcaaacgac

SEQ ID NO: 28898 - DNA, 21 bp, Artificial Sequence
  source: /note="Description of Artificial Sequence: Synthetic oligonucleotide"
gcaatcagaagcccaagccca

SEQ ID NO: 28899 - DNA, 21 bp, Artificial Sequence
  source: /note="Description of Artificial Sequence: Synthetic oligonucleotide"
gcaatcagatacacagaccca

SEQ ID NO: 28900 - DNA, 21 bp, Artificial Sequence
  source: /note="Description of Artificial Sequence: Synthetic oligonucleotide"
gcaatcagcgtcggaggaagc

SEQ ID NO: 28901 - DNA, 21 bp, Artificial Sequence
  source: /note="Description of Artificial Sequence: Synthetic oligonucleotide"
gcaatcacaacagcaagaaac

SEQ ID NO: 28902 - DNA, 21 bp, Artificial Sequence
  source: /note="Description of Artificial Sequence: Synthetic oligonucleotide"
gcaatctacggaggactcaca

SEQ ID NO: 28903 - DNA, 21 bp, Artificial Sequence
  source: /note="Description of Artificial Sequence: Synthetic oligonucleotide"
gcaatctacatgcaacaacca

SEQ ID NO: 28904 - DNA, 21 bp, Artificial Sequence
  source: /note="Description of Artificial Sequence: Synthetic oligonucleotide"
gcaatctaccaaggagtcgac

SEQ ID NO: 28905 - DNA, 21 bp, Artificial Sequence
  source: /note="Description of Artificial Sequence: Synthetic oligonucleotide"
gcaaaagcaagcaaccaagac

SEQ ID NO: 28906 - DNA, 21 bp, Artificial Sequence
  source: /note="Description of Artificial Sequence: Synthetic oligonucleotide"
gcaaaagcaacagcactcgaa

SEQ ID NO: 28907 - DNA, 21 bp, Artificial Sequence
  source: /note="Description of Artificial Sequence: Synthetic oligonucleotide"
gcaaaagacatcggacaaatc

SEQ ID NO: 28908 - DNA, 21 bp, Artificial Sequence
  source: /note="Description of Artificial Sequence: Synthetic oligonucleotide"
gcaaaagacatcccaccaaga

SEQ ID NO: 28909 - DNA, 21 bp, Artificial Sequence
  source: /note="Description of Artificial Sequence: Synthetic oligonucleotide"
gcaaaattcgcaccaagcgaa

SEQ ID NO: 28910 - DNA, 21 bp, Artificial Sequence
  source: /note="Description of Artificial Sequence: Synthetic oligonucleotide"
gcaaaaggagacccaagaatg

SEQ ID NO: 28911 - DNA, 21 bp, Artificial Sequence
  source: /note="Description of Artificial Sequence: Synthetic oligonucleotide"
gcaaaaggacaaatccacgtc

SEQ ID NO: 28912 - DNA, 21 bp, Artificial Sequence
  source: /note="Description of Artificial Sequence: Synthetic oligonucleotide"
gcaaaacacacagaattcagc

SEQ ID NO: 28913 - DNA, 21 bp, Artificial Sequence
  source: /note="Description of Artificial Sequence: Synthetic oligonucleotide"
gcaaaaatcagcagcgcaagc

SEQ ID NO: 28914 - DNA, 21 bp, Artificial Sequence
  source: /note="Description of Artificial Sequence: Synthetic oligonucleotide"
gcaaaactcgaagcaatccca

SEQ ID NO: 28915 - DNA, 21 bp, Artificial Sequence
  source: /note="Description of Artificial Sequence: Synthetic oligonucleotide"
gcaaaaaacagagacagctgc

SEQ ID NO: 28916 - DNA, 21 bp, Artificial Sequence
  source: /note="Description of Artificial Sequence: Synthetic oligonucleotide"
gcaaaaaacagcccacaccca

SEQ ID NO: 28917 - DNA, 21 bp, Artificial Sequence
  source: /note="Description of Artificial Sequence: Synthetic oligonucleotide"
gcaaaaaacagcacattcagc

SEQ ID NO: 28918 - DNA, 21 bp, Artificial Sequence
  source: /note="Description of Artificial Sequence: Synthetic oligonucleotide"
gcaaaaccagcactcctcgtc

SEQ ID NO: 28919 - DNA, 21 bp, Artificial Sequence
  source: /note="Description of Artificial Sequence: Synthetic oligonucleotide"
gcaaaaccacacctccaattc

SEQ ID NO: 28920 - DNA, 21 bp, Artificial Sequence
  source: /note="Description of Artificial Sequence: Synthetic oligonucleotide"
gcaaaaccaatcagaccacca

SEQ ID NO: 28921 - DNA, 21 bp, Artificial Sequence
  source: /note="Description of Artificial Sequence: Synthetic oligonucleotide"
gcaaaaccaagcgaagaaaaa

SEQ ID NO: 28922 - DNA, 21 bp, Artificial Sequence
  source: /note="Description of Artificial Sequence: Synthetic oligonucleotide"
gcaaaaccaacataccaacca

SEQ ID NO: 28923 - DNA, 21 bp, Artificial Sequence
  source: /note="Description of Artificial Sequence: Synthetic oligonucleotide"
gcaaaaagactcgacgacgca

SEQ ID NO: 28924 - DNA, 21 bp, Artificial Sequence
  source: /note="Description of Artificial Sequence: Synthetic oligonucleotide"
gcaaaaagcatcaaactcagc

SEQ ID NO: 28925 - DNA, 21 bp, Artificial Sequence
  source: /note="Description of Artificial Sequence: Synthetic oligonucleotide"
gcaaaaagcaacgtcggactc

SEQ ID NO: 28926 - DNA, 21 bp, Artificial Sequence
  source: /note="Description of Artificial Sequence: Synthetic oligonucleotide"
gcaaaaagcagctacccaatc

SEQ ID NO: 28927 - DNA, 21 bp, Artificial Sequence
  source: /note="Description of Artificial Sequence: Synthetic oligonucleotide"
gcaaaaagcgtcgcactcagc

SEQ ID NO: 28928 - DNA, 21 bp, Artificial Sequence
  source: /note="Description of Artificial Sequence: Synthetic oligonucleotide"
gcaaaaacaatcgaaatcagc

SEQ ID NO: 28929 - DNA, 21 bp, Artificial Sequence
  source: /note="Description of Artificial Sequence: Synthetic oligonucleotide"
gcaaaaacactcagagacgac

SEQ ID NO: 28930 - DNA, 21 bp, Artificial Sequence
  source: /note="Description of Artificial Sequence: Synthetic oligonucleotide"
gcaaaaacaatgggaacaatg

SEQ ID NO: 28931 - DNA, 21 bp, Artificial Sequence
  source: /note="Description of Artificial Sequence: Synthetic oligonucleotide"
gcaaaaacaacactcagcgca

SEQ ID NO: 28932 - DNA, 21 bp, Artificial Sequence
  source: /note="Description of Artificial Sequence: Synthetic oligonucleotide"
gcaaaatacagcccaagcgca

SEQ ID NO: 28933 - DNA, 21 bp, Artificial Sequence
  source: /note="Description of Artificial Sequence: Synthetic oligonucleotide"
gcaaaatacagcagcatgcca

SEQ ID NO: 28934 - DNA, 21 bp, Artificial Sequence
  source: /note="Description of Artificial Sequence: Synthetic oligonucleotide"
gcactcgcaatcggaagagac

SEQ ID NO: 28935 - DNA, 21 bp, Artificial Sequence
  source: /note="Description of Artificial Sequence: Synthetic oligonucleotide"
gcactcgcactcaaaacaagc

SEQ ID NO: 28936 - DNA, 21 bp, Artificial Sequence
  source: /note="Description of Artificial Sequence: Synthetic oligonucleotide"
gcactcgcaacaaaagtcatc

SEQ ID NO: 28937 - DNA, 21 bp, Artificial Sequence
  source: /note="Description of Artificial Sequence: Synthetic oligonucleotide"
gcactcgacgcaagaagagtc

SEQ ID NO: 28938 - DNA, 21 bp, Artificial Sequence
  source: /note="Description of Artificial Sequence: Synthetic oligonucleotide"
gcactcgaccaaatgacaatc

SEQ ID NO: 28939 - DNA, 21 bp, Artificial Sequence
  source: /note="Description of Artificial Sequence: Synthetic oligonucleotide"
gcactcgaatgcccaagagca

SEQ ID NO: 28940 - DNA, 21 bp, Artificial Sequence
  source: /note="Description of Artificial Sequence: Synthetic oligonucleotide"
gcactcgaaggactcagacca

SEQ ID NO: 28941 - DNA, 21 bp, Artificial Sequence
  source: /note="Description of Artificial Sequence: Synthetic oligonucleotide"
gcactcgaactcggaagcgaa

SEQ ID NO: 28942 - DNA, 21 bp, Artificial Sequence
  source: /note="Description of Artificial Sequence: Synthetic oligonucleotide"
gcactcgaaagaacaagcctc

SEQ ID NO: 28943 - DNA, 21 bp, Artificial Sequence
  source: /note="Description of Artificial Sequence: Synthetic oligonucleotide"
gcactcttcccaggaatgagc

SEQ ID NO: 28944 - DNA, 21 bp, Artificial Sequence
  source: /note="Description of Artificial Sequence: Synthetic oligonucleotide"
gcactcggagacttcccaagc

SEQ ID NO: 28945 - DNA, 21 bp, Artificial Sequence
  source: /note="Description of Artificial Sequence: Synthetic oligonucleotide"
gcactcggacaccaagcaatg

SEQ ID NO: 28946 - DNA, 21 bp, Artificial Sequence
  source: /note="Description of Artificial Sequence: Synthetic oligonucleotide"
gcactcggaaacaacaaaagc

SEQ ID NO: 28947 - DNA, 21 bp, Artificial Sequence
  source: /note="Description of Artificial Sequence: Synthetic oligonucleotide"
gcactcggaagaaacgaagga

SEQ ID NO: 28948 - DNA, 21 bp, Artificial Sequence
  source: /note="Description of Artificial Sequence: Synthetic oligonucleotide"
gcactcggagtcccaccaagc

SEQ ID NO: 28949 - DNA, 21 bp, Artificial Sequence
  source: /note="Description of Artificial Sequence: Synthetic oligonucleotide"
gcactcggagtcagcgcactc

SEQ ID NO: 28950 - DNA, 21 bp, Artificial Sequence
  source: /note="Description of Artificial Sequence: Synthetic oligonucleotide"
gcactcggataccacaacaca

SEQ ID NO: 28951 - DNA, 21 bp, Artificial Sequence
  source: /note="Description of Artificial Sequence: Synthetic oligonucleotide"
gcactccacccaagcgcacca

SEQ ID NO: 28952 - DNA, 21 bp, Artificial Sequence
  source: /note="Description of Artificial Sequence: Synthetic oligonucleotide"
gcactcatcgaaagagtcaac

SEQ ID NO: 28953 - DNA, 21 bp, Artificial Sequence
  source: /note="Description of Artificial Sequence: Synthetic oligonucleotide"
gcactcatcaaagtccacaac

SEQ ID NO: 28954 - DNA, 21 bp, Artificial Sequence
  source: /note="Description of Artificial Sequence: Synthetic oligonucleotide"
gcactcatcccaagcccacca

SEQ ID NO: 28955 - DNA, 21 bp, Artificial Sequence
  source: /note="Description of Artificial Sequence: Synthetic oligonucleotide"
gcactcctcgacagcaaactc

SEQ ID NO: 28956 - DNA, 21 bp, Artificial Sequence
  source: /note="Description of Artificial Sequence: Synthetic oligonucleotide"
gcactcctcgaacaaagacca

SEQ ID NO: 28957 - DNA, 21 bp, Artificial Sequence
  source: /note="Description of Artificial Sequence: Synthetic oligonucleotide"
gcactcctcggagtcaacaga

SEQ ID NO: 28958 - DNA, 21 bp, Artificial Sequence
  source: /note="Description of Artificial Sequence: Synthetic oligonucleotide"
gcactcctccacagcatcgga

SEQ ID NO: 28959 - DNA, 21 bp, Artificial Sequence
  source: /note="Description of Artificial Sequence: Synthetic oligonucleotide"
gcactcctccaaaacgcaagc

SEQ ID NO: 28960 - DNA, 21 bp, Artificial Sequence
  source: /note="Description of Artificial Sequence: Synthetic oligonucleotide"
gcactcctcagcagcggaaac

SEQ ID NO: 28961 - DNA, 21 bp, Artificial Sequence
  source: /note="Description of Artificial Sequence: Synthetic oligonucleotide"
gcactcatgagaggaacaatc

SEQ ID NO: 28962 - DNA, 21 bp, Artificial Sequence
  source: /note="Description of Artificial Sequence: Synthetic oligonucleotide"
gcactcaacgacgcagcagga

SEQ ID NO: 28963 - DNA, 21 bp, Artificial Sequence
  source: /note="Description of Artificial Sequence: Synthetic oligonucleotide"
gcactcaaccacgacaaacca

SEQ ID NO: 28964 - DNA, 21 bp, Artificial Sequence
  source: /note="Description of Artificial Sequence: Synthetic oligonucleotide"
gcactcaacatcccagaactc

SEQ ID NO: 28965 - DNA, 21 bp, Artificial Sequence
  source: /note="Description of Artificial Sequence: Synthetic oligonucleotide"
gcactcaacacacacacagtc

SEQ ID NO: 28966 - DNA, 21 bp, Artificial Sequence
  source: /note="Description of Artificial Sequence: Synthetic oligonucleotide"
gcactcccagcaaaaagctac

SEQ ID NO: 28967 - DNA, 21 bp, Artificial Sequence
  source: /note="Description of Artificial Sequence: Synthetic oligonucleotide"
gcactcccagcaagcgtcgac

SEQ ID NO: 28968 - DNA, 21 bp, Artificial Sequence
  source: /note="Description of Artificial Sequence: Synthetic oligonucleotide"
gcactcccaggaacaccaaac

SEQ ID NO: 28969 - DNA, 21 bp, Artificial Sequence
  source: /note="Description of Artificial Sequence: Synthetic oligonucleotide"
gcactcccactcagcagagca

SEQ ID NO: 28970 - DNA, 21 bp, Artificial Sequence
  source: /note="Description of Artificial Sequence: Synthetic oligonucleotide"
gcactcccacaactcgcagtc

SEQ ID NO: 28971 - DNA, 21 bp, Artificial Sequence
  source: /note="Description of Artificial Sequence: Synthetic oligonucleotide"
gcactcccacaaagaagagac

SEQ ID NO: 28972 - DNA, 21 bp, Artificial Sequence
  source: /note="Description of Artificial Sequence: Synthetic oligonucleotide"
gcactcccaagcagcgaccac

SEQ ID NO: 28973 - DNA, 21 bp, Artificial Sequence
  source: /note="Description of Artificial Sequence: Synthetic oligonucleotide"
gcactcccaagcacactcgtc

SEQ ID NO: 28974 - DNA, 21 bp, Artificial Sequence
  source: /note="Description of Artificial Sequence: Synthetic oligonucleotide"
gcactcccaacaacaaaagca

SEQ ID NO: 28975 - DNA, 21 bp, Artificial Sequence
  source: /note="Description of Artificial Sequence: Synthetic oligonucleotide"
gcactccaagcaccacacaca

SEQ ID NO: 28976 - DNA, 21 bp, Artificial Sequence
  source: /note="Description of Artificial Sequence: Synthetic oligonucleotide"
gcactccaaggatacagcgtc

SEQ ID NO: 28977 - DNA, 21 bp, Artificial Sequence
  source: /note="Description of Artificial Sequence: Synthetic oligonucleotide"
gcactccaaagagactggagc

SEQ ID NO: 28978 - DNA, 21 bp, Artificial Sequence
  source: /note="Description of Artificial Sequence: Synthetic oligonucleotide"
gcactccaaagcgacacagtc

SEQ ID NO: 28979 - DNA, 21 bp, Artificial Sequence
  source: /note="Description of Artificial Sequence: Synthetic oligonucleotide"
gcactccaaagcagcgtcaga

SEQ ID NO: 28980 - DNA, 21 bp, Artificial Sequence
  source: /note="Description of Artificial Sequence: Synthetic oligonucleotide"
gcactcagaatgggaatgaca

SEQ ID NO: 28981 - DNA, 21 bp, Artificial Sequence
  source: /note="Description of Artificial Sequence: Synthetic oligonucleotide"
gcactcagaaacccaatcaac

SEQ ID NO: 28982 - DNA, 21 bp, Artificial Sequence
  source: /note="Description of Artificial Sequence: Synthetic oligonucleotide"
gcactcagaacaagcctcaca

SEQ ID NO: 28983 - DNA, 21 bp, Artificial Sequence
  source: /note="Description of Artificial Sequence: Synthetic oligonucleotide"
gcactcagagtcgcagcaatg

SEQ ID NO: 28984 - DNA, 21 bp, Artificial Sequence
  source: /note="Description of Artificial Sequence: Synthetic oligonucleotide"
gcactcagcgcaggaagagtc

SEQ ID NO: 28985 - DNA, 21 bp, Artificial Sequence
  source: /note="Description of Artificial Sequence: Synthetic oligonucleotide"
gcactcagcgaactccaaatc

SEQ ID NO: 28986 - DNA, 21 bp, Artificial Sequence
  source: /note="Description of Artificial Sequence: Synthetic oligonucleotide"
gcactcagcggaacattcgga

SEQ ID NO: 28987 - DNA, 21 bp, Artificial Sequence
  source: /note="Description of Artificial Sequence: Synthetic oligonucleotide"
gcactcagccacgacggaaac

SEQ ID NO: 28988 - DNA, 21 bp, Artificial Sequence
  source: /note="Description of Artificial Sequence: Synthetic oligonucleotide"
gcactcagccacgaaagcaac

SEQ ID NO: 28989 - DNA, 21 bp, Artificial Sequence
  source: /note="Description of Artificial Sequence: Synthetic oligonucleotide"
gcactcagcaaatgggcaatg

SEQ ID NO: 28990 - DNA, 21 bp, Artificial Sequence
  source: /note="Description of Artificial Sequence: Synthetic oligonucleotide"
gcactcagcctcaacacaatc

SEQ ID NO: 28991 - DNA, 21 bp, Artificial Sequence
  source: /note="Description of Artificial Sequence: Synthetic oligonucleotide"
gcactcagcccaatgccatgc

SEQ ID NO: 28992 - DNA, 21 bp, Artificial Sequence
  source: /note="Description of Artificial Sequence: Synthetic oligonucleotide"
gcactcagccaagcagaaaga

SEQ ID NO: 28993 - DNA, 21 bp, Artificial Sequence
  source: /note="Description of Artificial Sequence: Synthetic oligonucleotide"
gcactcagcagagacagacca

SEQ ID NO: 28994 - DNA, 21 bp, Artificial Sequence
  source: /note="Description of Artificial Sequence: Synthetic oligonucleotide"
gcactcagcagcatccacgtc

SEQ ID NO: 28995 - DNA, 21 bp, Artificial Sequence
  source: /note="Description of Artificial Sequence: Synthetic oligonucleotide"
gcactcagcagcagcgcactc

SEQ ID NO: 28996 - DNA, 21 bp, Artificial Sequence
  source: /note="Description of Artificial Sequence: Synthetic oligonucleotide"
gcactcagcacaggaatgcca

SEQ ID NO: 28997 - DNA, 21 bp, Artificial Sequence
  source: /note="Description of Artificial Sequence: Synthetic oligonucleotide"
gcactcagcacaccagtccca

SEQ ID NO: 28998 - DNA, 21 bp, Artificial Sequence
  source: /note="Description of Artificial Sequence: Synthetic oligonucleotide"
gcactcacacactacgaccca

SEQ ID NO: 28999 - DNA, 21 bp, Artificial Sequence
  source: /note="Description of Artificial Sequence: Synthetic oligonucleotide"
gcactcacaaaaaacgtcgca

SEQ ID NO: 29000 - DNA, 21 bp, Artificial Sequence
  source: /note="Description of Artificial Sequence: Synthetic oligonucleotide"
gcactcacaagaagcgcagtc

SEQ ID NO: 29001 - DNA, 21 bp, Artificial Sequence
  source: /note="Description of Artificial Sequence: Synthetic oligonucleotide"
gcactcacaagcacacacgtc

SEQ ID NO: 29002 - DNA, 21 bp, Artificial Sequence
  source: /note="Description of Artificial Sequence: Synthetic oligonucleotide"
gcactcacaacactcgcagaa

SEQ ID NO: 29003 - DNA, 21 bp, Artificial Sequence
  source: /note="Description of Artificial Sequence: Synthetic oligonucleotide"
gcactcacaacactcggacca

SEQ ID NO: 29004 - DNA, 21 bp, Artificial Sequence
  source: /note="Description of Artificial Sequence: Synthetic oligonucleotide"
gcactcacagtcctcctcgaa

SEQ ID NO: 29005 - DNA, 21 bp, Artificial Sequence
  source: /note="Description of Artificial Sequence: Synthetic oligonucleotide"
gcactcgtcagcagcaacctc

SEQ ID NO: 29006 - DNA, 21 bp, Artificial Sequence
  source: /note="Description of Artificial Sequence: Synthetic oligonucleotide"
gcactctacgacaacgcacca

SEQ ID NO: 29007 - DNA, 21 bp, Artificial Sequence
  source: /note="Description of Artificial Sequence: Synthetic oligonucleotide"
gcactctacaacacaccacca

SEQ ID NO: 29008 - DNA, 21 bp, Artificial Sequence
  source: /note="Description of Artificial Sequence: Synthetic oligonucleotide"
gcactctacacacacctcgac

SEQ ID NO: 29009 - DNA, 21 bp, Artificial Sequence
  source: /note="Description of Artificial Sequence: Synthetic oligonucleotide"
gcaatggcagcaagcccagca

SEQ ID NO: 29010 - DNA, 21 bp, Artificial Sequence
  source: /note="Description of Artificial Sequence: Synthetic oligonucleotide"
gcaatggcaccaaaactcagc

SEQ ID NO: 29011 - DNA, 21 bp, Artificial Sequence
  source: /note="Description of Artificial Sequence: Synthetic oligonucleotide"
gcaatggcaagaccaagcgga

SEQ ID NO: 29012 - DNA, 21 bp, Artificial Sequence
  source: /note="Description of Artificial Sequence: Synthetic oligonucleotide"
gcaatggaacacagcgtcaaa

SEQ ID NO: 29013 - DNA, 21 bp, Artificial Sequence
  source: /note="Description of Artificial Sequence: Synthetic oligonucleotide"
gcaatggaaacatgcgacctc

SEQ ID NO: 29014 - DNA, 21 bp, Artificial Sequence
  source: /note="Description of Artificial Sequence: Synthetic oligonucleotide"
gcaatgggaccaagcgcaagc

SEQ ID NO: 29015 - DNA, 21 bp, Artificial Sequence
  source: /note="Description of Artificial Sequence: Synthetic oligonucleotide"
gcaatgatccaaatgagagaa

SEQ ID NO: 29016 - DNA, 21 bp, Artificial Sequence
  source: /note="Description of Artificial Sequence: Synthetic oligonucleotide"
gcaatgaaagcacaaaacaca

SEQ ID NO: 29017 - DNA, 21 bp, Artificial Sequence
  source: /note="Description of Artificial Sequence: Synthetic oligonucleotide"
gcaatgaaagacaacagaagc

SEQ ID NO: 29018 - DNA, 21 bp, Artificial Sequence
  source: /note="Description of Artificial Sequence: Synthetic oligonucleotide"
gcaatgaaactcaacatgcca

SEQ ID NO: 29019 - DNA, 21 bp, Artificial Sequence
  source: /note="Description of Artificial Sequence: Synthetic oligonucleotide"
gcaatgatgcaacacgtcgca

SEQ ID NO: 29020 - DNA, 21 bp, Artificial Sequence
  source: /note="Description of Artificial Sequence: Synthetic oligonucleotide"
gcaatgatgagcgcagaaagc

SEQ ID NO: 29021 - DNA, 21 bp, Artificial Sequence
  source: /note="Description of Artificial Sequence: Synthetic oligonucleotide"
gcaatgccaggactcggagtc

SEQ ID NO: 29022 - DNA, 21 bp, Artificial Sequence
  source: /note="Description of Artificial Sequence: Synthetic oligonucleotide"
gcaatgccaggactccaaagc

SEQ ID NO: 29023 - DNA, 21 bp, Artificial Sequence
  source: /note="Description of Artificial Sequence: Synthetic oligonucleotide"
gcaatgccaagactcacacca

SEQ ID NO: 29024 - DNA, 21 bp, Artificial Sequence
  source: /note="Description of Artificial Sequence: Synthetic oligonucleotide"
gcaatgccaagacaagtcagc

SEQ ID NO: 29025 - DNA, 21 bp, Artificial Sequence
  source: /note="Description of Artificial Sequence: Synthetic oligonucleotide"
gcaatgccaacagtcgtcgca

SEQ ID NO: 29026 - DNA, 21 bp, Artificial Sequence
  source: /note="Description of Artificial Sequence: Synthetic oligonucleotide"
gcaatgcaaacagacagagtc

SEQ ID NO: 29027 - DNA, 21 bp, Artificial Sequence
  source: /note="Description of Artificial Sequence: Synthetic oligonucleotide"
gcaatgagaccaagccacgaa

SEQ ID NO: 29028 - DNA, 21 bp, Artificial Sequence
  source: /note="Description of Artificial Sequence: Synthetic oligonucleotide"
gcaatgagcctcatccacgca

SEQ ID NO: 29029 - DNA, 21 bp, Artificial Sequence
  source: /note="Description of Artificial Sequence: Synthetic oligonucleotide"
gcaatgagcagcgcaagctac

SEQ ID NO: 29030 - DNA, 21 bp, Artificial Sequence
  source: /note="Description of Artificial Sequence: Synthetic oligonucleotide"
gcaatgagcagcatcgcagga

SEQ ID NO: 29031 - DNA, 21 bp, Artificial Sequence
  source: /note="Description of Artificial Sequence: Synthetic oligonucleotide"
gcaatgagcacacaactcagc

SEQ ID NO: 29032 - DNA, 21 bp, Artificial Sequence
  source: /note="Description of Artificial Sequence: Synthetic oligonucleotide"
gcaatgacagacaaagtccaa

SEQ ID NO: 29033 - DNA, 21 bp, Artificial Sequence
  source: /note="Description of Artificial Sequence: Synthetic oligonucleotide"
gcaatgacagacgtcagagga

SEQ ID NO: 29034 - DNA, 21 bp, Artificial Sequence
  source: /note="Description of Artificial Sequence: Synthetic oligonucleotide"
gcaatgacacacatgccaagc

SEQ ID NO: 29035 - DNA, 21 bp, Artificial Sequence
  source: /note="Description of Artificial Sequence: Synthetic oligonucleotide"
gcaatgacactcagaagcgac

SEQ ID NO: 29036 - DNA, 21 bp, Artificial Sequence
  source: /note="Description of Artificial Sequence: Synthetic oligonucleotide"
gcaatgacaagcccaaaactc

SEQ ID NO: 29037 - DNA, 21 bp, Artificial Sequence
  source: /note="Description of Artificial Sequence: Synthetic oligonucleotide"
gcaatgtggggagcagacgca

SEQ ID NO: 29038 - DNA, 21 bp, Artificial Sequence
  source: /note="Description of Artificial Sequence: Synthetic oligonucleotide"
gcaaacgcaggaggaagccca

SEQ ID NO: 29039 - DNA, 21 bp, Artificial Sequence
  source: /note="Description of Artificial Sequence: Synthetic oligonucleotide"
gcaaacgacagcagagcagtc

SEQ ID NO: 29040 - DNA, 21 bp, Artificial Sequence
  source: /note="Description of Artificial Sequence: Synthetic oligonucleotide"
gcaaacgaagacttcagaaaa

SEQ ID NO: 29041 - DNA, 21 bp, Artificial Sequence
  source: /note="Description of Artificial Sequence: Synthetic oligonucleotide"
gcaaacgaaccagacgtcctc

SEQ ID NO: 29042 - DNA, 21 bp, Artificial Sequence
  source: /note="Description of Artificial Sequence: Synthetic oligonucleotide"
gcaaacggagcaagcagccca

SEQ ID NO: 29043 - DNA, 21 bp, Artificial Sequence
  source: /note="Description of Artificial Sequence: Synthetic oligonucleotide"
gcaaaccacggagcaacattc

SEQ ID NO: 29044 - DNA, 21 bp, Artificial Sequence
  source: /note="Description of Artificial Sequence: Synthetic oligonucleotide"
gcaaaccacacaacaagaagc

SEQ ID NO: 29045 - DNA, 21 bp, Artificial Sequence
  source: /note="Description of Artificial Sequence: Synthetic oligonucleotide"
gcaaacaaaccacaagtcaca

SEQ ID NO: 29046 - DNA, 21 bp, Artificial Sequence
  source: /note="Description of Artificial Sequence: Synthetic oligonucleotide"
gcaaacctcggactcccacca

SEQ ID NO: 29047 - DNA, 21 bp, Artificial Sequence
  source: /note="Description of Artificial Sequence: Synthetic oligonucleotide"
gcaaacctcggaagcgcaaga

SEQ ID NO: 29048 - DNA, 21 bp, Artificial Sequence
  source: /note="Description of Artificial Sequence: Synthetic oligonucleotide"
gcaaacctcccaggacacctc

SEQ ID NO: 29049 - DNA, 21 bp, Artificial Sequence
  source: /note="Description of Artificial Sequence: Synthetic oligonucleotide"
gcaaacatgacaagagtcgaa

SEQ ID NO: 29050 - DNA, 21 bp, Artificial Sequence
  source: /note="Description of Artificial Sequence: Synthetic oligonucleotide"
gcaaacatgacagtccactgc

SEQ ID NO: 29051 - DNA, 21 bp, Artificial Sequence
  source: /note="Description of Artificial Sequence: Synthetic oligonucleotide"
gcaaacccagcaaaaacagtc

SEQ ID NO: 29052 - DNA, 21 bp, Artificial Sequence
  source: /note="Description of Artificial Sequence: Synthetic oligonucleotide"
gcaaacccaggaaaaatctac

SEQ ID NO: 29053 - DNA, 21 bp, Artificial Sequence
  source: /note="Description of Artificial Sequence: Synthetic oligonucleotide"
gcaaacccaggaacagcacca

SEQ ID NO: 29054 - DNA, 21 bp, Artificial Sequence
  source: /note="Description of Artificial Sequence: Synthetic oligonucleotide"
gcaaacccactcctcagcagc

SEQ ID NO: 29055 - DNA, 21 bp, Artificial Sequence
  source: /note="Description of Artificial Sequence: Synthetic oligonucleotide"
gcaaaccaaggaatcgacagc

SEQ ID NO: 29056 - DNA, 21 bp, Artificial Sequence
  source: /note="Description of Artificial Sequence: Synthetic oligonucleotide"
gcaaaccaaaacaacaaaaac

SEQ ID NO: 29057 - DNA, 21 bp, Artificial Sequence
  source: /note="Description of Artificial Sequence: Synthetic oligonucleotide"
gcaaaccaaagcctcccaagc

SEQ ID NO: 29058 - DNA, 21 bp, Artificial Sequence
  source: /note="Description of Artificial Sequence: Synthetic oligonucleotide"
gcaaacagaagcggacacgga

SEQ ID NO: 29059 - DNA, 21 bp, Artificial Sequence
  source: /note="Description of Artificial Sequence: Synthetic oligonucleotide"
gcaaacagcgactggggacca

SEQ ID NO: 29060 - DNA, 21 bp, Artificial Sequence
  source: /note="Description of Artificial Sequence: Synthetic oligonucleotide"
gcaaacagcgaagaattcgtc

SEQ ID NO: 29061 - DNA, 21 bp, Artificial Sequence
  source: /note="Description of Artificial Sequence: Synthetic oligonucleotide"
gcaaacagcggaccaccacca

SEQ ID NO: 29062 - DNA, 21 bp, Artificial Sequence
  source: /note="Description of Artificial Sequence: Synthetic oligonucleotide"
gcaaacagccacgaacaaatg

SEQ ID NO: 29063 - DNA, 21 bp, Artificial Sequence
  source: /note="Description of Artificial Sequence: Synthetic oligonucleotide"
gcaaacagccacatgctcaaa

SEQ ID NO: 29064 - DNA, 21 bp, Artificial Sequence
  source: /note="Description of Artificial Sequence: Synthetic oligonucleotide"
gcaaacagcatgatgcaccca

SEQ ID NO: 29065 - DNA, 21 bp, Artificial Sequence
  source: /note="Description of Artificial Sequence: Synthetic oligonucleotide"
gcaaacagcaacagcgtctac

SEQ ID NO: 29066 - DNA, 21 bp, Artificial Sequence
  source: /note="Description of Artificial Sequence: Synthetic oligonucleotide"
gcaaacagcagactcggagga

SEQ ID NO: 29067 - DNA, 21 bp, Artificial Sequence
  source: /note="Description of Artificial Sequence: Synthetic oligonucleotide"
gcaaacagcagaccaacacaa

SEQ ID NO: 29068 - DNA, 21 bp, Artificial Sequence
  source: /note="Description of Artificial Sequence: Synthetic oligonucleotide"
gcaaacagcagaagcatggtc

SEQ ID NO: 29069 - DNA, 21 bp, Artificial Sequence
  source: /note="Description of Artificial Sequence: Synthetic oligonucleotide"
gcaaacagcagcagcccagga

SEQ ID NO: 29070 - DNA, 21 bp, Artificial Sequence
  source: /note="Description of Artificial Sequence: Synthetic oligonucleotide"
gcaaacagcacaaaaggactc

SEQ ID NO: 29071 - DNA, 21 bp, Artificial Sequence
  source: /note="Description of Artificial Sequence: Synthetic oligonucleotide"
gcaaacacagacccaagaaac

SEQ ID NO: 29072 - DNA, 21 bp, Artificial Sequence
  source: /note="Description of Artificial Sequence: Synthetic oligonucleotide"
gcaaacacagaaacaatctgg

SEQ ID NO: 29073 - DNA, 21 bp, Artificial Sequence
  source: /note="Description of Artificial Sequence: Synthetic oligonucleotide"
gcaaacacactcctccacgtc

SEQ ID NO: 29074 - DNA, 21 bp, Artificial Sequence
  source: /note="Description of Artificial Sequence: Synthetic oligonucleotide"
gcaaacgtcgcaagcagcgga

SEQ ID NO: 29075 - DNA, 21 bp, Artificial Sequence
  source: /note="Description of Artificial Sequence: Synthetic oligonucleotide"
gcaaacgtcagcagcacacac

SEQ ID NO: 29076 - DNA, 21 bp, Artificial Sequence
  source: /note="Description of Artificial Sequence: Synthetic oligonucleotide"
gcaaacgtcagcgtccaagtc

SEQ ID NO: 29077 - DNA, 21 bp, Artificial Sequence
  source: /note="Description of Artificial Sequence: Synthetic oligonucleotide"
gcaccagcagaccacagaatg

SEQ ID NO: 29078 - DNA, 21 bp, Artificial Sequence
  source: /note="Description of Artificial Sequence: Synthetic oligonucleotide"
gcaccagcagacatgacaagc

SEQ ID NO: 29079 - DNA, 21 bp, Artificial Sequence
  source: /note="Description of Artificial Sequence: Synthetic oligonucleotide"
gcaccagcagactggccagtc

SEQ ID NO: 29080 - DNA, 21 bp, Artificial Sequence
  source: /note="Description of Artificial Sequence: Synthetic oligonucleotide"
gcaccagcaggaagaccaagc

SEQ ID NO: 29081 - DNA, 21 bp, Artificial Sequence
  source: /note="Description of Artificial Sequence: Synthetic oligonucleotide"
gcaccagcactcggactcgca

SEQ ID NO: 29082 - DNA, 21 bp, Artificial Sequence
  source: /note="Description of Artificial Sequence: Synthetic oligonucleotide"
gcaccagcaaacgacgaagga

SEQ ID NO: 29083 - DNA, 21 bp, Artificial Sequence
  source: /note="Description of Artificial Sequence: Synthetic oligonucleotide"
gcaccagcacaaagactctac

SEQ ID NO: 29084 - DNA, 21 bp, Artificial Sequence
  source: /note="Description of Artificial Sequence: Synthetic oligonucleotide"
gcaccagcaagaatggtcaac

SEQ ID NO: 29085 - DNA, 21 bp, Artificial Sequence
  source: /note="Description of Artificial Sequence: Synthetic oligonucleotide"
gcaccagacggaacatacctc

SEQ ID NO: 29086 - DNA, 21 bp, Artificial Sequence
  source: /note="Description of Artificial Sequence: Synthetic oligonucleotide"
gcaccagacccaagcagcctc

SEQ ID NO: 29087 - DNA, 21 bp, Artificial Sequence
  source: /note="Description of Artificial Sequence: Synthetic oligonucleotide"
gcaccagaagacgcaggaagc

SEQ ID NO: 29088 - DNA, 21 bp, Artificial Sequence
  source: /note="Description of Artificial Sequence: Synthetic oligonucleotide"
gcaccagaaacaaacgacagc

SEQ ID NO: 29089 - DNA, 21 bp, Artificial Sequence
  source: /note="Description of Artificial Sequence: Synthetic oligonucleotide"
gcaccattcaacacacaagga

SEQ ID NO: 29090 - DNA, 21 bp, Artificial Sequence
  source: /note="Description of Artificial Sequence: Synthetic oligonucleotide"
gcaccattcccagaaaaatgg

SEQ ID NO: 29091 - DNA, 21 bp, Artificial Sequence
  source: /note="Description of Artificial Sequence: Synthetic oligonucleotide"
gcaccattcccagaacaacca

SEQ ID NO: 29092 - DNA, 21 bp, Artificial Sequence
  source: /note="Description of Artificial Sequence: Synthetic oligonucleotide"
gcaccaggaatcacaaactac

SEQ ID NO: 29093 - DNA, 21 bp, Artificial Sequence
  source: /note="Description of Artificial Sequence: Synthetic oligonucleotide"
gcaccaggactcagacacagc

SEQ ID NO: 29094 - DNA, 21 bp, Artificial Sequence
  source: /note="Description of Artificial Sequence: Synthetic oligonucleotide"
gcaccaggaagactcagcctc

SEQ ID NO: 29095 - DNA, 21 bp, Artificial Sequence
  source: /note="Description of Artificial Sequence: Synthetic oligonucleotide"
gcaccacacttcccaagcaca

SEQ ID NO: 29096 - DNA, 21 bp, Artificial Sequence
  source: /note="Description of Artificial Sequence: Synthetic oligonucleotide"
gcaccacacctcccaacacac

SEQ ID NO: 29097 - DNA, 21 bp, Artificial Sequence
  source: /note="Description of Artificial Sequence: Synthetic oligonucleotide"
gcaccaatcctcagaacacca

SEQ ID NO: 29098 - DNA, 21 bp, Artificial Sequence
  source: /note="Description of Artificial Sequence: Synthetic oligonucleotide"
gcaccaatcagccaccaaatg

SEQ ID NO: 29099 - DNA, 21 bp, Artificial Sequence
  source: /note="Description of Artificial Sequence: Synthetic oligonucleotide"
gcaccactcgcagtcagacca

SEQ ID NO: 29100 - DNA, 21 bp, Artificial Sequence
  source: /note="Description of Artificial Sequence: Synthetic oligonucleotide"
gcaccactcaaaagcgtccaa

SEQ ID NO: 29101 - DNA, 21 bp, Artificial Sequence
  source: /note="Description of Artificial Sequence: Synthetic oligonucleotide"
gcaccaaacctcctcatcgga

SEQ ID NO: 29102 - DNA, 21 bp, Artificial Sequence
  source: /note="Description of Artificial Sequence: Synthetic oligonucleotide"
gcaccaaacagcggagtcaaa

SEQ ID NO: 29103 - DNA, 21 bp, Artificial Sequence
  source: /note="Description of Artificial Sequence: Synthetic oligonucleotide"
gcaccaaacacaagcgtcaga

SEQ ID NO: 29104 - DNA, 21 bp, Artificial Sequence
  source: /note="Description of Artificial Sequence: Synthetic oligonucleotide"
gcaccaccaaacctcgaaagc

SEQ ID NO: 29105 - DNA, 21 bp, Artificial Sequence
  source: /note="Description of Artificial Sequence: Synthetic oligonucleotide"
gcaccaccaaacgtcagaaca

SEQ ID NO: 29106 - DNA, 21 bp, Artificial Sequence
  source: /note="Description of Artificial Sequence: Synthetic oligonucleotide"
gcaccaccaagcctcagaaca

SEQ ID NO: 29107 - DNA, 21 bp, Artificial Sequence
  source: /note="Description of Artificial Sequence: Synthetic oligonucleotide"
gcaccacaagcaaaaacacca

SEQ ID NO: 29108 - DNA, 21 bp, Artificial Sequence
  source: /note="Description of Artificial Sequence: Synthetic oligonucleotide"
gcaccacaaggaagacaaatc

SEQ ID NO: 29109 - DNA, 21 bp, Artificial Sequence
  source: /note="Description of Artificial Sequence: Synthetic oligonucleotide"
gcaccacaactccaaccagca

SEQ ID NO: 29110 - DNA, 21 bp, Artificial Sequence
  source: /note="Description of Artificial Sequence: Synthetic oligonucleotide"
gcaccacaaccaaaagaccca

SEQ ID NO: 29111 - DNA, 21 bp, Artificial Sequence
  source: /note="Description of Artificial Sequence: Synthetic oligonucleotide"
gcaccaagagcagtcaactac

SEQ ID NO: 29112 - DNA, 21 bp, Artificial Sequence
  source: /note="Description of Artificial Sequence: Synthetic oligonucleotide"
gcaccaagactcacagtcagc

SEQ ID NO: 29113 - DNA, 21 bp, Artificial Sequence
  source: /note="Description of Artificial Sequence: Synthetic oligonucleotide"
gcaccaagaccaccactcgtc

SEQ ID NO: 29114 - DNA, 21 bp, Artificial Sequence
  source: /note="Description of Artificial Sequence: Synthetic oligonucleotide"
gcaccaagacaaacacacaac

SEQ ID NO: 29115 - DNA, 21 bp, Artificial Sequence
  source: /note="Description of Artificial Sequence: Synthetic oligonucleotide"
gcaccaagaacacacagcaca

SEQ ID NO: 29116 - DNA, 21 bp, Artificial Sequence
  source: /note="Description of Artificial Sequence: Synthetic oligonucleotide"
gcaccaagagtcctccaaaca

SEQ ID NO: 29117 - DNA, 21 bp, Artificial Sequence
  source: /note="Description of Artificial Sequence: Synthetic oligonucleotide"
gcaccaagatacgaactcaga

SEQ ID NO: 29118 - DNA, 21 bp, Artificial Sequence
  source: /note="Description of Artificial Sequence: Synthetic oligonucleotide"
gcaccaagcggaagcacaagc

SEQ ID NO: 29119 - DNA, 21 bp, Artificial Sequence
  source: /note="Description of Artificial Sequence: Synthetic oligonucleotide"
gcaccaagcggagtcaaacca

SEQ ID NO: 29120 - DNA, 21 bp, Artificial Sequence
  source: /note="Description of Artificial Sequence: Synthetic oligonucleotide"
gcaccaagcaaaatggcaatc

SEQ ID NO: 29121 - DNA, 21 bp, Artificial Sequence
  source: /note="Description of Artificial Sequence: Synthetic oligonucleotide"
gcaccaagcagatgcgcactc

SEQ ID NO: 29122 - DNA, 21 bp, Artificial Sequence
  source: /note="Description of Artificial Sequence: Synthetic oligonucleotide"
gcaccaagcagcgcagaaaac

SEQ ID NO: 29123 - DNA, 21 bp, Artificial Sequence
  source: /note="Description of Artificial Sequence: Synthetic oligonucleotide"
gcaccaagcacactcaacaac

SEQ ID NO: 29124 - DNA, 21 bp, Artificial Sequence
  source: /note="Description of Artificial Sequence: Synthetic oligonucleotide"
gcaccaagcgtcagaccaatc

SEQ ID NO: 29125 - DNA, 21 bp, Artificial Sequence
  source: /note="Description of Artificial Sequence: Synthetic oligonucleotide"
gcaccaagcgtcgtcacaaca

SEQ ID NO: 29126 - DNA, 21 bp, Artificial Sequence
  source: /note="Description of Artificial Sequence: Synthetic oligonucleotide"
gcaccaacagcaggaagcatg

SEQ ID NO: 29127 - DNA, 21 bp, Artificial Sequence
  source: /note="Description of Artificial Sequence: Synthetic oligonucleotide"
gcaccaacaccacacccaagc

SEQ ID NO: 29128 - DNA, 21 bp, Artificial Sequence
  source: /note="Description of Artificial Sequence: Synthetic oligonucleotide"
gcaccaacaccaaaaggaatc

SEQ ID NO: 29129 - DNA, 21 bp, Artificial Sequence
  source: /note="Description of Artificial Sequence: Synthetic oligonucleotide"
gcaccaacaagaaacccacaa

SEQ ID NO: 29130 - DNA, 21 bp, Artificial Sequence
  source: /note="Description of Artificial Sequence: Synthetic oligonucleotide"
gcaccaacaacaccaagcctc

SEQ ID NO: 29131 - DNA, 21 bp, Artificial Sequence
  source: /note="Description of Artificial Sequence: Synthetic oligonucleotide"
gcaccaacagtcagcaacatc

SEQ ID NO: 29132 - DNA, 21 bp, Artificial Sequence
  source: /note="Description of Artificial Sequence: Synthetic oligonucleotide"
gcaccagtcccagaccaaaca

SEQ ID NO: 29133 - DNA, 21 bp, Artificial Sequence
  source: /note="Description of Artificial Sequence: Synthetic oligonucleotide"
gcaccagtcacagacaacttc

SEQ ID NO: 29134 - DNA, 21 bp, Artificial Sequence
  source: /note="Description of Artificial Sequence: Synthetic oligonucleotide"
gcacaagcactcagaggacac

SEQ ID NO: 29135 - DNA, 21 bp, Artificial Sequence
  source: /note="Description of Artificial Sequence: Synthetic oligonucleotide"
gcacaagcaccaagaacagaa

SEQ ID NO: 29136 - DNA, 21 bp, Artificial Sequence
  source: /note="Description of Artificial Sequence: Synthetic oligonucleotide"
gcacaagcaacaagcagcctc

SEQ ID NO: 29137 - DNA, 21 bp, Artificial Sequence
  source: /note="Description of Artificial Sequence: Synthetic oligonucleotide"
gcacaatgcagcacacacctc

SEQ ID NO: 29138 - DNA, 21 bp, Artificial Sequence
  source: /note="Description of Artificial Sequence: Synthetic oligonucleotide"
gcacaagacagagcaacaaga

SEQ ID NO: 29139 - DNA, 21 bp, Artificial Sequence
  source: /note="Description of Artificial Sequence: Synthetic oligonucleotide"
gcacaattcagcacaaaagac

SEQ ID NO: 29140 - DNA, 21 bp, Artificial Sequence
  source: /note="Description of Artificial Sequence: Synthetic oligonucleotide"
gcacaaggacaaacaatgctc

SEQ ID NO: 29141 - DNA, 21 bp, Artificial Sequence
  source: /note="Description of Artificial Sequence: Synthetic oligonucleotide"
gcacaaggacaagtcacacca

SEQ ID NO: 29142 - DNA, 21 bp, Artificial Sequence
  source: /note="Description of Artificial Sequence: Synthetic oligonucleotide"
gcacaaggatggacaagcgga

SEQ ID NO: 29143 - DNA, 21 bp, Artificial Sequence
  source: /note="Description of Artificial Sequence: Synthetic oligonucleotide"
gcacaacacaaactcggactc

SEQ ID NO: 29144 - DNA, 21 bp, Artificial Sequence
  source: /note="Description of Artificial Sequence: Synthetic oligonucleotide"
gcacaacacagaggagaaaca

SEQ ID NO: 29145 - DNA, 21 bp, Artificial Sequence
  source: /note="Description of Artificial Sequence: Synthetic oligonucleotide"
gcacaaatccacatggaaatg

SEQ ID NO: 29146 - DNA, 21 bp, Artificial Sequence
  source: /note="Description of Artificial Sequence: Synthetic oligonucleotide"
gcacaaaaaccaacaacaatg

SEQ ID NO: 29147 - DNA, 21 bp, Artificial Sequence
  source: /note="Description of Artificial Sequence: Synthetic oligonucleotide"
gcacaaaaaccagtcgtcatc

SEQ ID NO: 29148 - DNA, 21 bp, Artificial Sequence
  source: /note="Description of Artificial Sequence: Synthetic oligonucleotide"
gcacaaaaacaaaaagcacca

SEQ ID NO: 29149 - DNA, 21 bp, Artificial Sequence
  source: /note="Description of Artificial Sequence: Synthetic oligonucleotide"
gcacaaaacatgagaaacaac

SEQ ID NO: 29150 - DNA, 21 bp, Artificial Sequence
  source: /note="Description of Artificial Sequence: Synthetic oligonucleotide"
gcacaaccaggaacagtcttc

SEQ ID NO: 29151 - DNA, 21 bp, Artificial Sequence
  source: /note="Description of Artificial Sequence: Synthetic oligonucleotide"
gcacaaccaagcctctacgca

SEQ ID NO: 29152 - DNA, 21 bp, Artificial Sequence
  source: /note="Description of Artificial Sequence: Synthetic oligonucleotide"
gcacaaccaacaagagcagac

SEQ ID NO: 29153 - DNA, 21 bp, Artificial Sequence
  source: /note="Description of Artificial Sequence: Synthetic oligonucleotide"
gcacaaccagtcagcagactc

SEQ ID NO: 29154 - DNA, 21 bp, Artificial Sequence
  source: /note="Description of Artificial Sequence: Synthetic oligonucleotide"
gcacaaagactcagcggagga

SEQ ID NO: 29155 - DNA, 21 bp, Artificial Sequence
  source: /note="Description of Artificial Sequence: Synthetic oligonucleotide"
gcacaaagaaacacaagccca

SEQ ID NO: 29156 - DNA, 21 bp, Artificial Sequence
  source: /note="Description of Artificial Sequence: Synthetic oligonucleotide"
gcacaaagaccaacaagcgtc

SEQ ID NO: 29157 - DNA, 21 bp, Artificial Sequence
  source: /note="Description of Artificial Sequence: Synthetic oligonucleotide"
gcacaaagcggagcaatcagc

SEQ ID NO: 29158 - DNA, 21 bp, Artificial Sequence
  source: /note="Description of Artificial Sequence: Synthetic oligonucleotide"
gcacaaagcagaagcccactc

SEQ ID NO: 29159 - DNA, 21 bp, Artificial Sequence
  source: /note="Description of Artificial Sequence: Synthetic oligonucleotide"
gcacaaacaagcctcagactc

SEQ ID NO: 29160 - DNA, 21 bp, Artificial Sequence
  source: /note="Description of Artificial Sequence: Synthetic oligonucleotide"
gcacaaacaagcatgcacaca

SEQ ID NO: 29161 - DNA, 21 bp, Artificial Sequence
  source: /note="Description of Artificial Sequence: Synthetic oligonucleotide"
gcacaatacatcccaagcaca

SEQ ID NO: 29162 - DNA, 21 bp, Artificial Sequence
  source: /note="Description of Artificial Sequence: Synthetic oligonucleotide"
gcacaatacccaaaaccaaac

SEQ ID NO: 29163 - DNA, 21 bp, Artificial Sequence
  source: /note="Description of Artificial Sequence: Synthetic oligonucleotide"
gcaagagcaggagacctcgtc

SEQ ID NO: 29164 - DNA, 21 bp, Artificial Sequence
  source: /note="Description of Artificial Sequence: Synthetic oligonucleotide"
gcaagagcacacgacagcaca

SEQ ID NO: 29165 - DNA, 21 bp, Artificial Sequence
  source: /note="Description of Artificial Sequence: Synthetic oligonucleotide"
gcaagagcacacctcacagca

SEQ ID NO: 29166 - DNA, 21 bp, Artificial Sequence
  source: /note="Description of Artificial Sequence: Synthetic oligonucleotide"
gcaagagcactcagcccaaac

SEQ ID NO: 29167 - DNA, 21 bp, Artificial Sequence
  source: /note="Description of Artificial Sequence: Synthetic oligonucleotide"
gcaagagcaccaggagaactc

SEQ ID NO: 29168 - DNA, 21 bp, Artificial Sequence
  source: /note="Description of Artificial Sequence: Synthetic oligonucleotide"
gcaagagcaccaggaccaatc

SEQ ID NO: 29169 - DNA, 21 bp, Artificial Sequence
  source: /note="Description of Artificial Sequence: Synthetic oligonucleotide"
gcaagagcaccaacactcatg

SEQ ID NO: 29170 - DNA, 21 bp, Artificial Sequence
  source: /note="Description of Artificial Sequence: Synthetic oligonucleotide"
gcaagagcaagcccaatgaca

SEQ ID NO: 29171 - DNA, 21 bp, Artificial Sequence
  source: /note="Description of Artificial Sequence: Synthetic oligonucleotide"
gcaagagacttcaacgcaagc

SEQ ID NO: 29172 - DNA, 21 bp, Artificial Sequence
  source: /note="Description of Artificial Sequence: Synthetic oligonucleotide"
gcaagagacggagtcagcctc

SEQ ID NO: 29173 - DNA, 21 bp, Artificial Sequence
  source: /note="Description of Artificial Sequence: Synthetic oligonucleotide"
gcaagagacctcccagcatac

SEQ ID NO: 29174 - DNA, 21 bp, Artificial Sequence
  source: /note="Description of Artificial Sequence: Synthetic oligonucleotide"
gcaagagacatggtcccacac

SEQ ID NO: 29175 - DNA, 21 bp, Artificial Sequence
  source: /note="Description of Artificial Sequence: Synthetic oligonucleotide"
gcaagagaccaaagaagccca

SEQ ID NO: 29176 - DNA, 21 bp, Artificial Sequence
  source: /note="Description of Artificial Sequence: Synthetic oligonucleotide"
gcaagagaacacagccaactc

SEQ ID NO: 29177 - DNA, 21 bp, Artificial Sequence
  source: /note="Description of Artificial Sequence: Synthetic oligonucleotide"
gcaagagaactcggaagaagc

SEQ ID NO: 29178 - DNA, 21 bp, Artificial Sequence
  source: /note="Description of Artificial Sequence: Synthetic oligonucleotide"
gcaagattcgacgtcggaagc

SEQ ID NO: 29179 - DNA, 21 bp, Artificial Sequence
  source: /note="Description of Artificial Sequence: Synthetic oligonucleotide"
gcaagattcgaaacaggacac

SEQ ID NO: 29180 - DNA, 21 bp, Artificial Sequence
  source: /note="Description of Artificial Sequence: Synthetic oligonucleotide"
gcaagaggactcgcagcacac

SEQ ID NO: 29181 - DNA, 21 bp, Artificial Sequence
  source: /note="Description of Artificial Sequence: Synthetic oligonucleotide"
gcaagaggaaacgcacaagca

SEQ ID NO: 29182 - DNA, 21 bp, Artificial Sequence
  source: /note="Description of Artificial Sequence: Synthetic oligonucleotide"
gcaagaggaaacgtcatgatc

SEQ ID NO: 29183 - DNA, 21 bp, Artificial Sequence
  source: /note="Description of Artificial Sequence: Synthetic oligonucleotide"
gcaagaggaagcgacgcaagc

SEQ ID NO: 29184 - DNA, 21 bp, Artificial Sequence
  source: /note="Description of Artificial Sequence: Synthetic oligonucleotide"
gcaagaggaagcatgacactc

SEQ ID NO: 29185 - DNA, 21 bp, Artificial Sequence
  source: /note="Description of Artificial Sequence: Synthetic oligonucleotide"
gcaagaggagtcgcaagccca

SEQ ID NO: 29186 - DNA, 21 bp, Artificial Sequence
  source: /note="Description of Artificial Sequence: Synthetic oligonucleotide"
gcaagacacgcaagcgtcgca

SEQ ID NO: 29187 - DNA, 21 bp, Artificial Sequence
  source: /note="Description of Artificial Sequence: Synthetic oligonucleotide"
gcaagacacatgccaatcgaa

SEQ ID NO: 29188 - DNA, 21 bp, Artificial Sequence
  source: /note="Description of Artificial Sequence: Synthetic oligonucleotide"
gcaagaatctacgaaagccca

SEQ ID NO: 29189 - DNA, 21 bp, Artificial Sequence
  source: /note="Description of Artificial Sequence: Synthetic oligonucleotide"
gcaagactcgcaacaagcgaa

SEQ ID NO: 29190 - DNA, 21 bp, Artificial Sequence
  source: /note="Description of Artificial Sequence: Synthetic oligonucleotide"
gcaagactcggatacgacgga

SEQ ID NO: 29191 - DNA, 21 bp, Artificial Sequence
  source: /note="Description of Artificial Sequence: Synthetic oligonucleotide"
gcaagactcaacttcgcagca

SEQ ID NO: 29192 - DNA, 21 bp, Artificial Sequence
  source: /note="Description of Artificial Sequence: Synthetic oligonucleotide"
gcaagactccaaacagcagtc

SEQ ID NO: 29193 - DNA, 21 bp, Artificial Sequence
  source: /note="Description of Artificial Sequence: Synthetic oligonucleotide"
gcaagaatgggactcggactc

SEQ ID NO: 29194 - DNA, 21 bp, Artificial Sequence
  source: /note="Description of Artificial Sequence: Synthetic oligonucleotide"
gcaagaatgccaatgctcgaa

SEQ ID NO: 29195 - DNA, 21 bp, Artificial Sequence
  source: /note="Description of Artificial Sequence: Synthetic oligonucleotide"
gcaagaatgccaagcccacca

SEQ ID NO: 29196 - DNA, 21 bp, Artificial Sequence
  source: /note="Description of Artificial Sequence: Synthetic oligonucleotide"
gcaagaatggtcgacccaatc

SEQ ID NO: 29197 - DNA, 21 bp, Artificial Sequence
  source: /note="Description of Artificial Sequence: Synthetic oligonucleotide"
gcaagaatggtcggagaacca

SEQ ID NO: 29198 - DNA, 21 bp, Artificial Sequence
  source: /note="Description of Artificial Sequence: Synthetic oligonucleotide"
gcaagaaacccaggaccagac

SEQ ID NO: 29199 - DNA, 21 bp, Artificial Sequence
  source: /note="Description of Artificial Sequence: Synthetic oligonucleotide"
gcaagaaaccaagcagcacaa

SEQ ID NO: 29200 - DNA, 21 bp, Artificial Sequence
  source: /note="Description of Artificial Sequence: Synthetic oligonucleotide"
gcaagaaacagcctcagcgac

SEQ ID NO: 29201 - DNA, 21 bp, Artificial Sequence
  source: /note="Description of Artificial Sequence: Synthetic oligonucleotide"
gcaagaccagaaatcaaatac

SEQ ID NO: 29202 - DNA, 21 bp, Artificial Sequence
  source: /note="Description of Artificial Sequence: Synthetic oligonucleotide"
gcaagaccagaatacagagtc

SEQ ID NO: 29203 - DNA, 21 bp, Artificial Sequence
  source: /note="Description of Artificial Sequence: Synthetic oligonucleotide"
gcaagaccaccaaacagctac

SEQ ID NO: 29204 - DNA, 21 bp, Artificial Sequence
  source: /note="Description of Artificial Sequence: Synthetic oligonucleotide"
gcaagaccaacagaacacgaa

SEQ ID NO: 29205 - DNA, 21 bp, Artificial Sequence
  source: /note="Description of Artificial Sequence: Synthetic oligonucleotide"
gcaagacaacacttcgcacca

SEQ ID NO: 29206 - DNA, 21 bp, Artificial Sequence
  source: /note="Description of Artificial Sequence: Synthetic oligonucleotide"
gcaagacaacacgtcggacca

SEQ ID NO: 29207 - DNA, 21 bp, Artificial Sequence
  source: /note="Description of Artificial Sequence: Synthetic oligonucleotide"
gcaagacaaacaatgaacgaa

SEQ ID NO: 29208 - DNA, 21 bp, Artificial Sequence
  source: /note="Description of Artificial Sequence: Synthetic oligonucleotide"
gcaagaagagacccaccactc

SEQ ID NO: 29209 - DNA, 21 bp, Artificial Sequence
  source: /note="Description of Artificial Sequence: Synthetic oligonucleotide"
gcaagaagcgcagcactcgca

SEQ ID NO: 29210 - DNA, 21 bp, Artificial Sequence
  source: /note="Description of Artificial Sequence: Synthetic oligonucleotide"
gcaagaagcgcacaaacaaac

SEQ ID NO: 29211 - DNA, 21 bp, Artificial Sequence
  source: /note="Description of Artificial Sequence: Synthetic oligonucleotide"
gcaagaagcgacagagtcagc

SEQ ID NO: 29212 - DNA, 21 bp, Artificial Sequence
  source: /note="Description of Artificial Sequence: Synthetic oligonucleotide"
gcaagaagcgaaccaacacca

SEQ ID NO: 29213 - DNA, 21 bp, Artificial Sequence
  source: /note="Description of Artificial Sequence: Synthetic oligonucleotide"
gcaagaagcggagaaggattc

SEQ ID NO: 29214 - DNA, 21 bp, Artificial Sequence
  source: /note="Description of Artificial Sequence: Synthetic oligonucleotide"
gcaagaagccacatcgtcagc

SEQ ID NO: 29215 - DNA, 21 bp, Artificial Sequence
  source: /note="Description of Artificial Sequence: Synthetic oligonucleotide"
gcaagaagcatcagcgtcgtc

SEQ ID NO: 29216 - DNA, 21 bp, Artificial Sequence
  source: /note="Description of Artificial Sequence: Synthetic oligonucleotide"
gcaagaagcatcgtcggacca

SEQ ID NO: 29217 - DNA, 21 bp, Artificial Sequence
  source: /note="Description of Artificial Sequence: Synthetic oligonucleotide"
gcaagaagcaacgaactccac

SEQ ID NO: 29218 - DNA, 21 bp, Artificial Sequence
  source: /note="Description of Artificial Sequence: Synthetic oligonucleotide"
gcaagaagcccagacgtcctc

SEQ ID NO: 29219 - DNA, 21 bp, Artificial Sequence
  source: /note="Description of Artificial Sequence: Synthetic oligonucleotide"
gcaagaagcccacacgtctac

SEQ ID NO: 29220 - DNA, 21 bp, Artificial Sequence
  source: /note="Description of Artificial Sequence: Synthetic oligonucleotide"
gcaagaagcagaccactcgaa

SEQ ID NO: 29221 - DNA, 21 bp, Artificial Sequence
  source: /note="Description of Artificial Sequence: Synthetic oligonucleotide"
gcaagaagcagcgacctcgaa

SEQ ID NO: 29222 - DNA, 21 bp, Artificial Sequence
  source: /note="Description of Artificial Sequence: Synthetic oligonucleotide"
gcaagaagcagcccaccactc

SEQ ID NO: 29223 - DNA, 21 bp, Artificial Sequence
  source: /note="Description of Artificial Sequence: Synthetic oligonucleotide"
gcaagaagcacagtcctcgga

SEQ ID NO: 29224 - DNA, 21 bp, Artificial Sequence
  source: /note="Description of Artificial Sequence: Synthetic oligonucleotide"
gcaagaagcgtcgcaacaagc

SEQ ID NO: 29225 - DNA, 21 bp, Artificial Sequence
  source: /note="Description of Artificial Sequence: Synthetic oligonucleotide"
gcaagaagcgtccaagacagc

SEQ ID NO: 29226 - DNA, 21 bp, Artificial Sequence
  source: /note="Description of Artificial Sequence: Synthetic oligonucleotide"
gcaagaacagcaagcctccca

SEQ ID NO: 29227 - DNA, 21 bp, Artificial Sequence
  source: /note="Description of Artificial Sequence: Synthetic oligonucleotide"
gcaagaacaggagcatacagc

SEQ ID NO: 29228 - DNA, 21 bp, Artificial Sequence
  source: /note="Description of Artificial Sequence: Synthetic oligonucleotide"
gcaagaacactcccacaactc

SEQ ID NO: 29229 - DNA, 21 bp, Artificial Sequence
  source: /note="Description of Artificial Sequence: Synthetic oligonucleotide"
gcaagaacactcagcacacac

SEQ ID NO: 29230 - DNA, 21 bp, Artificial Sequence
  source: /note="Description of Artificial Sequence: Synthetic oligonucleotide"
gcaagaacaccagtcctctac

SEQ ID NO: 29231 - DNA, 21 bp, Artificial Sequence
  source: /note="Description of Artificial Sequence: Synthetic oligonucleotide"
gcaagaacaagcgaagaacca

SEQ ID NO: 29232 - DNA, 21 bp, Artificial Sequence
  source: /note="Description of Artificial Sequence: Synthetic oligonucleotide"
gcaagaacaacagtcggactc

SEQ ID NO: 29233 - DNA, 21 bp, Artificial Sequence
  source: /note="Description of Artificial Sequence: Synthetic oligonucleotide"
gcaagaacagtcccaagcatg

SEQ ID NO: 29234 - DNA, 21 bp, Artificial Sequence
  source: /note="Description of Artificial Sequence: Synthetic oligonucleotide"
gcaagagtcgacgtcagcatg

SEQ ID NO: 29235 - DNA, 21 bp, Artificial Sequence
  source: /note="Description of Artificial Sequence: Synthetic oligonucleotide"
gcaagagtcaacagagaacca

SEQ ID NO: 29236 - DNA, 21 bp, Artificial Sequence
  source: /note="Description of Artificial Sequence: Synthetic oligonucleotide"
gcaagagtcagcctcgaagca

SEQ ID NO: 29237 - DNA, 21 bp, Artificial Sequence
  source: /note="Description of Artificial Sequence: Synthetic oligonucleotide"
gcaagagtcgtcgcaccagaa

SEQ ID NO: 29238 - DNA, 21 bp, Artificial Sequence
  source: /note="Description of Artificial Sequence: Synthetic oligonucleotide"
gcaagatacggaggaatggtc

SEQ ID NO: 29239 - DNA, 21 bp, Artificial Sequence
  source: /note="Description of Artificial Sequence: Synthetic oligonucleotide"
gcaagcgcattcaaacaacca

SEQ ID NO: 29240 - DNA, 21 bp, Artificial Sequence
  source: /note="Description of Artificial Sequence: Synthetic oligonucleotide"
gcaagcgcaggaggacaacca

SEQ ID NO: 29241 - DNA, 21 bp, Artificial Sequence
  source: /note="Description of Artificial Sequence: Synthetic oligonucleotide"
gcaagcgcaggaccaccacca

SEQ ID NO: 29242 - DNA, 21 bp, Artificial Sequence
  source: /note="Description of Artificial Sequence: Synthetic oligonucleotide"
gcaagcgcacaacaagtcagc

SEQ ID NO: 29243 - DNA, 21 bp, Artificial Sequence
  source: /note="Description of Artificial Sequence: Synthetic oligonucleotide"
gcaagcgcaagcaacagagga

SEQ ID NO: 29244 - DNA, 21 bp, Artificial Sequence
  source: /note="Description of Artificial Sequence: Synthetic oligonucleotide"
gcaagctgcagcagcacaaca

SEQ ID NO: 29245 - DNA, 21 bp, Artificial Sequence
  source: /note="Description of Artificial Sequence: Synthetic oligonucleotide"
gcaagcgacgcaagctgcagc

SEQ ID NO: 29246 - DNA, 21 bp, Artificial Sequence
  source: /note="Description of Artificial Sequence: Synthetic oligonucleotide"
gcaagcgacctcagcctcaga

SEQ ID NO: 29247 - DNA, 21 bp, Artificial Sequence
  source: /note="Description of Artificial Sequence: Synthetic oligonucleotide"
gcaagcgacatgctcaaaagc

SEQ ID NO: 29248 - DNA, 21 bp, Artificial Sequence
  source: /note="Description of Artificial Sequence: Synthetic oligonucleotide"
gcaagcgacaacatcagagca

SEQ ID NO: 29249 - DNA, 21 bp, Artificial Sequence
  source: /note="Description of Artificial Sequence: Synthetic oligonucleotide"
gcaagcgacccaatgaaagga

SEQ ID NO: 29250 - DNA, 21 bp, Artificial Sequence
  source: /note="Description of Artificial Sequence: Synthetic oligonucleotide"
gcaagcgacacaacaacaatg

SEQ ID NO: 29251 - DNA, 21 bp, Artificial Sequence
  source: /note="Description of Artificial Sequence: Synthetic oligonucleotide"
gcaagcgacgtcagcagacca

SEQ ID NO: 29252 - DNA, 21 bp, Artificial Sequence
  source: /note="Description of Artificial Sequence: Synthetic oligonucleotide"
gcaagcgaagaaagagcaaac

SEQ ID NO: 29253 - DNA, 21 bp, Artificial Sequence
  source: /note="Description of Artificial Sequence: Synthetic oligonucleotide"
gcaagcgaaaacagccaaaac

SEQ ID NO: 29254 - DNA, 21 bp, Artificial Sequence
  source: /note="Description of Artificial Sequence: Synthetic oligonucleotide"
gcaagcgaaagaaacagactc

SEQ ID NO: 29255 - DNA, 21 bp, Artificial Sequence
  source: /note="Description of Artificial Sequence: Synthetic oligonucleotide"
gcaagcgaagtcagcaacgca

SEQ ID NO: 29256 - DNA, 21 bp, Artificial Sequence
  source: /note="Description of Artificial Sequence: Synthetic oligonucleotide"
gcaagcttctgcacaagctgg

SEQ ID NO: 29257 - DNA, 21 bp, Artificial Sequence
  source: /note="Description of Artificial Sequence: Synthetic oligonucleotide"
gcaagcttccacggaggagtc

SEQ ID NO: 29258 - DNA, 21 bp, Artificial Sequence
  source: /note="Description of Artificial Sequence: Synthetic oligonucleotide"
gcaagcttcatggaagcagca

SEQ ID NO: 29259 - DNA, 21 bp, Artificial Sequence
  source: /note="Description of Artificial Sequence: Synthetic oligonucleotide"
gcaagcttcccagcaacaagc

SEQ ID NO: 29260 - DNA, 21 bp, Artificial Sequence
  source: /note="Description of Artificial Sequence: Synthetic oligonucleotide"
gcaagcttcagactcatggca

SEQ ID NO: 29261 - DNA, 21 bp, Artificial Sequence
  source: /note="Description of Artificial Sequence: Synthetic oligonucleotide"
gcaagcggaagagcagtcgga

SEQ ID NO: 29262 - DNA, 21 bp, Artificial Sequence
  source: /note="Description of Artificial Sequence: Synthetic oligonucleotide"
gcaagcggaagacaagacctc

SEQ ID NO: 29263 - DNA, 21 bp, Artificial Sequence
  source: /note="Description of Artificial Sequence: Synthetic oligonucleotide"
gcaagcggaagcgacgacagc

SEQ ID NO: 29264 - DNA, 21 bp, Artificial Sequence
  source: /note="Description of Artificial Sequence: Synthetic oligonucleotide"
gcaagcggaagcacaagcgga

SEQ ID NO: 29265 - DNA, 21 bp, Artificial Sequence
  source: /note="Description of Artificial Sequence: Synthetic oligonucleotide"
gcaagcggaacaagagcagca

SEQ ID NO: 29266 - DNA, 21 bp, Artificial Sequence
  source: /note="Description of Artificial Sequence: Synthetic oligonucleotide"
gcaagcggaacatacacaagc

SEQ ID NO: 29267 - DNA, 21 bp, Artificial Sequence
  source: /note="Description of Artificial Sequence: Synthetic oligonucleotide"
gcaagcggatacctcccacaa

SEQ ID NO: 29268 - DNA, 21 bp, Artificial Sequence
  source: /note="Description of Artificial Sequence: Synthetic oligonucleotide"
gcaagccacgaaagagacttc

SEQ ID NO: 29269 - DNA, 21 bp, Artificial Sequence
  source: /note="Description of Artificial Sequence: Synthetic oligonucleotide"
gcaagccaccacctcacagaa

SEQ ID NO: 29270 - DNA, 21 bp, Artificial Sequence
  source: /note="Description of Artificial Sequence: Synthetic oligonucleotide"
gcaagccacagaagcggagac

SEQ ID NO: 29271 - DNA, 21 bp, Artificial Sequence
  source: /note="Description of Artificial Sequence: Synthetic oligonucleotide"
gcaagcatccacacaacaagc

SEQ ID NO: 29272 - DNA, 21 bp, Artificial Sequence
  source: /note="Description of Artificial Sequence: Synthetic oligonucleotide"
gcaagcatcagcggaagcgca

SEQ ID NO: 29273 - DNA, 21 bp, Artificial Sequence
  source: /note="Description of Artificial Sequence: Synthetic oligonucleotide"
gcaagcatcagcatcggagca

SEQ ID NO: 29274 - DNA, 21 bp, Artificial Sequence
  source: /note="Description of Artificial Sequence: Synthetic oligonucleotide"
gcaagcctcccaagcccaaga

SEQ ID NO: 29275 - DNA, 21 bp, Artificial Sequence
  source: /note="Description of Artificial Sequence: Synthetic oligonucleotide"
gcaagcctcagagcaacagga

SEQ ID NO: 29276 - DNA, 21 bp, Artificial Sequence
  source: /note="Description of Artificial Sequence: Synthetic oligonucleotide"
gcaagcctcagcgcagcaatg

SEQ ID NO: 29277 - DNA, 21 bp, Artificial Sequence
  source: /note="Description of Artificial Sequence: Synthetic oligonucleotide"
gcaagcctcagcggaagcatg

SEQ ID NO: 29278 - DNA, 21 bp, Artificial Sequence
  source: /note="Description of Artificial Sequence: Synthetic oligonucleotide"
gcaagcctcagcaacctccca

SEQ ID NO: 29279 - DNA, 21 bp, Artificial Sequence
  source: /note="Description of Artificial Sequence: Synthetic oligonucleotide"
gcaagcctcagcccactcctc

SEQ ID NO: 29280 - DNA, 21 bp, Artificial Sequence
  source: /note="Description of Artificial Sequence: Synthetic oligonucleotide"
gcaagcatgaaaccaacaatc

SEQ ID NO: 29281 - DNA, 21 bp, Artificial Sequence
  source: /note="Description of Artificial Sequence: Synthetic oligonucleotide"
gcaagcatgaacggactccca

SEQ ID NO: 29282 - DNA, 21 bp, Artificial Sequence
  source: /note="Description of Artificial Sequence: Synthetic oligonucleotide"
gcaagcatgaacatgaacgca

SEQ ID NO: 29283 - DNA, 21 bp, Artificial Sequence
  source: /note="Description of Artificial Sequence: Synthetic oligonucleotide"
gcaagcaacaaaagcagcctc

SEQ ID NO: 29284 - DNA, 21 bp, Artificial Sequence
  source: /note="Description of Artificial Sequence: Synthetic oligonucleotide"
gcaagcaacagagtcagctac

SEQ ID NO: 29285 - DNA, 21 bp, Artificial Sequence
  source: /note="Description of Artificial Sequence: Synthetic oligonucleotide"
gcaagcaacagcgcactcaga

SEQ ID NO: 29286 - DNA, 21 bp, Artificial Sequence
  source: /note="Description of Artificial Sequence: Synthetic oligonucleotide"
gcaagcccagcagcagtccac

SEQ ID NO: 29287 - DNA, 21 bp, Artificial Sequence
  source: /note="Description of Artificial Sequence: Synthetic oligonucleotide"
gcaagcccactcaacagcagc

SEQ ID NO: 29288 - DNA, 21 bp, Artificial Sequence
  source: /note="Description of Artificial Sequence: Synthetic oligonucleotide"
gcaagcccaccacaaacaaca

SEQ ID NO: 29289 - DNA, 21 bp, Artificial Sequence
  source: /note="Description of Artificial Sequence: Synthetic oligonucleotide"
gcaagcccacaattcaacagc

SEQ ID NO: 29290 - DNA, 21 bp, Artificial Sequence
  source: /note="Description of Artificial Sequence: Synthetic oligonucleotide"
gcaagcccaagaggaagagaa

SEQ ID NO: 29291 - DNA, 21 bp, Artificial Sequence
  source: /note="Description of Artificial Sequence: Synthetic oligonucleotide"
gcaagccaagcagcatgcctc

SEQ ID NO: 29292 - DNA, 21 bp, Artificial Sequence
  source: /note="Description of Artificial Sequence: Synthetic oligonucleotide"
gcaagccaaatcgaaccaaca

SEQ ID NO: 29293 - DNA, 21 bp, Artificial Sequence
  source: /note="Description of Artificial Sequence: Synthetic oligonucleotide"
gcaagccaaatcagaacaaca

SEQ ID NO: 29294 - DNA, 21 bp, Artificial Sequence
  source: /note="Description of Artificial Sequence: Synthetic oligonucleotide"
gcaagccaaccaagcagagtc

SEQ ID NO: 29295 - DNA, 21 bp, Artificial Sequence
  source: /note="Description of Artificial Sequence: Synthetic oligonucleotide"
gcaagccaacaaccaagaagc

SEQ ID NO: 29296 - DNA, 21 bp, Artificial Sequence
  source: /note="Description of Artificial Sequence: Synthetic oligonucleotide"
gcaagccaaagactcggagga

SEQ ID NO: 29297 - DNA, 21 bp, Artificial Sequence
  source: /note="Description of Artificial Sequence: Synthetic oligonucleotide"
gcaagccaaagcagagacgca

SEQ ID NO: 29298 - DNA, 21 bp, Artificial Sequence
  source: /note="Description of Artificial Sequence: Synthetic oligonucleotide"
gcaagccaatacagagaaagc

SEQ ID NO: 29299 - DNA, 21 bp, Artificial Sequence
  source: /note="Description of Artificial Sequence: Synthetic oligonucleotide"
gcaagcagagcaccagcagga

SEQ ID NO: 29300 - DNA, 21 bp, Artificial Sequence
  source: /note="Description of Artificial Sequence: Synthetic oligonucleotide"
gcaagcagagcaccaagcaac

SEQ ID NO: 29301 - DNA, 21 bp, Artificial Sequence
  source: /note="Description of Artificial Sequence: Synthetic oligonucleotide"
gcaagcagagacaacgtcgac

SEQ ID NO: 29302 - DNA, 21 bp, Artificial Sequence
  source: /note="Description of Artificial Sequence: Synthetic oligonucleotide"
gcaagcagaggaatgagcaca

SEQ ID NO: 29303 - DNA, 21 bp, Artificial Sequence
  source: /note="Description of Artificial Sequence: Synthetic oligonucleotide"
gcaagcagaccatacctcgtc

SEQ ID NO: 29304 - DNA, 21 bp, Artificial Sequence
  source: /note="Description of Artificial Sequence: Synthetic oligonucleotide"
gcaagcagaagcacaacaagc

SEQ ID NO: 29305 - DNA, 21 bp, Artificial Sequence
  source: /note="Description of Artificial Sequence: Synthetic oligonucleotide"
gcaagcagaacaatcgcacca

SEQ ID NO: 29306 - DNA, 21 bp, Artificial Sequence
  source: /note="Description of Artificial Sequence: Synthetic oligonucleotide"
gcaagcagaacaacaccactc

SEQ ID NO: 29307 - DNA, 21 bp, Artificial Sequence
  source: /note="Description of Artificial Sequence: Synthetic oligonucleotide"
gcaagcagcgcaagaccaatc

SEQ ID NO: 29308 - DNA, 21 bp, Artificial Sequence
  source: /note="Description of Artificial Sequence: Synthetic oligonucleotide"
gcaagcagcgcagtcctcaca

SEQ ID NO: 29309 - DNA, 21 bp, Artificial Sequence
  source: /note="Description of Artificial Sequence: Synthetic oligonucleotide"
gcaagcagcgaaagaggagaa

SEQ ID NO: 29310 - DNA, 21 bp, Artificial Sequence
  source: /note="Description of Artificial Sequence: Synthetic oligonucleotide"
gcaagcagcggagacgtcctc

SEQ ID NO: 29311 - DNA, 21 bp, Artificial Sequence
  source: /note="Description of Artificial Sequence: Synthetic oligonucleotide"
gcaagcagcggaccagacaaa

SEQ ID NO: 29312 - DNA, 21 bp, Artificial Sequence
  source: /note="Description of Artificial Sequence: Synthetic oligonucleotide"
gcaagcagcggaagaagcgca

SEQ ID NO: 29313 - DNA, 21 bp, Artificial Sequence
  source: /note="Description of Artificial Sequence: Synthetic oligonucleotide"
gcaagcagcggaagcggaaca

SEQ ID NO: 29314 - DNA, 21 bp, Artificial Sequence
  source: /note="Description of Artificial Sequence: Synthetic oligonucleotide"
gcaagcagcaaaggaagcaac

SEQ ID NO: 29315 - DNA, 21 bp, Artificial Sequence
  source: /note="Description of Artificial Sequence: Synthetic oligonucleotide"
gcaagcagcaaaccagcaaac

SEQ ID NO: 29316 - DNA, 21 bp, Artificial Sequence
  source: /note="Description of Artificial Sequence: Synthetic oligonucleotide"
gcaagcagcaaaccactcgga

SEQ ID NO: 29317 - DNA, 21 bp, Artificial Sequence
  source: /note="Description of Artificial Sequence: Synthetic oligonucleotide"
gcaagcagcccaaaaatctac

SEQ ID NO: 29318 - DNA, 21 bp, Artificial Sequence
  source: /note="Description of Artificial Sequence: Synthetic oligonucleotide"
gcaagcagcccagtcctcagc

SEQ ID NO: 29319 - DNA, 21 bp, Artificial Sequence
  source: /note="Description of Artificial Sequence: Synthetic oligonucleotide"
gcaagcagccaacacggactc

SEQ ID NO: 29320 - DNA, 21 bp, Artificial Sequence
  source: /note="Description of Artificial Sequence: Synthetic oligonucleotide"
gcaagcagcagaacagtcaac

SEQ ID NO: 29321 - DNA, 21 bp, Artificial Sequence
  source: /note="Description of Artificial Sequence: Synthetic oligonucleotide"
gcaagcagcagcgacagcaga

SEQ ID NO: 29322 - DNA, 21 bp, Artificial Sequence
  source: /note="Description of Artificial Sequence: Synthetic oligonucleotide"
gcaagcagcagcctcagcttc

SEQ ID NO: 29323 - DNA, 21 bp, Artificial Sequence
  source: /note="Description of Artificial Sequence: Synthetic oligonucleotide"
gcaagcagcacaagcctcgaa

SEQ ID NO: 29324 - DNA, 21 bp, Artificial Sequence
  source: /note="Description of Artificial Sequence: Synthetic oligonucleotide"
gcaagcagcgtcaacccaagc

SEQ ID NO: 29325 - DNA, 21 bp, Artificial Sequence
  source: /note="Description of Artificial Sequence: Synthetic oligonucleotide"
gcaagcacagcactcctcctc

SEQ ID NO: 29326 - DNA, 21 bp, Artificial Sequence
  source: /note="Description of Artificial Sequence: Synthetic oligonucleotide"
gcaagcacaggaatcgtcctc

SEQ ID NO: 29327 - DNA, 21 bp, Artificial Sequence
  source: /note="Description of Artificial Sequence: Synthetic oligonucleotide"
gcaagcacaggaagcttcgga

SEQ ID NO: 29328 - DNA, 21 bp, Artificial Sequence
  source: /note="Description of Artificial Sequence: Synthetic oligonucleotide"
gcaagcacaggaagccaagaa

SEQ ID NO: 29329 - DNA, 21 bp, Artificial Sequence
  source: /note="Description of Artificial Sequence: Synthetic oligonucleotide"
gcaagcacactccaagtcgga

SEQ ID NO: 29330 - DNA, 21 bp, Artificial Sequence
  source: /note="Description of Artificial Sequence: Synthetic oligonucleotide"
gcaagcacaccaaacctcctc

SEQ ID NO: 29331 - DNA, 21 bp, Artificial Sequence
  source: /note="Description of Artificial Sequence: Synthetic oligonucleotide"
gcaagcacacaaaaacaagca

SEQ ID NO: 29332 - DNA, 21 bp, Artificial Sequence
  source: /note="Description of Artificial Sequence: Synthetic oligonucleotide"
gcaagcacaagaatgctcttc

SEQ ID NO: 29333 - DNA, 21 bp, Artificial Sequence
  source: /note="Description of Artificial Sequence: Synthetic oligonucleotide"
gcaagcacaacattcagacca

SEQ ID NO: 29334 - DNA, 21 bp, Artificial Sequence
  source: /note="Description of Artificial Sequence: Synthetic oligonucleotide"
gcaagcacaacaagaatgctc

SEQ ID NO: 29335 - DNA, 21 bp, Artificial Sequence
  source: /note="Description of Artificial Sequence: Synthetic oligonucleotide"
gcaagcgtcctccaagaagca

SEQ ID NO: 29336 - DNA, 21 bp, Artificial Sequence
  source: /note="Description of Artificial Sequence: Synthetic oligonucleotide"
gcaagcgtcccactcatccca

SEQ ID NO: 29337 - DNA, 21 bp, Artificial Sequence
  source: /note="Description of Artificial Sequence: Synthetic oligonucleotide"
gcaagcgtcagaatgggagac

SEQ ID NO: 29338 - DNA, 21 bp, Artificial Sequence
  source: /note="Description of Artificial Sequence: Synthetic oligonucleotide"
gcaagcgtcagcatggtcgca

SEQ ID NO: 29339 - DNA, 21 bp, Artificial Sequence
  source: /note="Description of Artificial Sequence: Synthetic oligonucleotide"
gcaagcgtcagcacagaagga

SEQ ID NO: 29340 - DNA, 21 bp, Artificial Sequence
  source: /note="Description of Artificial Sequence: Synthetic oligonucleotide"
gcaagctgggacatcaacatc

SEQ ID NO: 29341 - DNA, 21 bp, Artificial Sequence
  source: /note="Description of Artificial Sequence: Synthetic oligonucleotide"
gcaagctgggacagcaacatc

SEQ ID NO: 29342 - DNA, 21 bp, Artificial Sequence
  source: /note="Description of Artificial Sequence: Synthetic oligonucleotide"
gcaagctacgacacaagcaga

SEQ ID NO: 29343 - DNA, 21 bp, Artificial Sequence
  source: /note="Description of Artificial Sequence: Synthetic oligonucleotide"
gcaagctacgacgtcagcagc

SEQ ID NO: 29344 - DNA, 21 bp, Artificial Sequence
  source: /note="Description of Artificial Sequence: Synthetic oligonucleotide"
gcaacagcagcaacagcatac

SEQ ID NO: 29345 - DNA, 21 bp, Artificial Sequence
  source: /note="Description of Artificial Sequence: Synthetic oligonucleotide"
gcaacagcagcaacaacaagc

SEQ ID NO: 29346 - DNA, 21 bp, Artificial Sequence
  source: /note="Description of Artificial Sequence: Synthetic oligonucleotide"
gcaacagcaggactctaccaa

SEQ ID NO: 29347 - DNA, 21 bp, Artificial Sequence
  source: /note="Description of Artificial Sequence: Synthetic oligonucleotide"
gcaacagcaaaaatcctcgac

SEQ ID NO: 29348 - DNA, 21 bp, Artificial Sequence
  source: /note="Description of Artificial Sequence: Synthetic oligonucleotide"
gcaacagcaaaactcctccca

SEQ ID NO: 29349 - DNA, 21 bp, Artificial Sequence
  source: /note="Description of Artificial Sequence: Synthetic oligonucleotide"
gcaacagcaaaaccactcatc

SEQ ID NO: 29350 - DNA, 21 bp, Artificial Sequence
  source: /note="Description of Artificial Sequence: Synthetic oligonucleotide"
gcaacagcaagacaagtccaa

SEQ ID NO: 29351 - DNA, 21 bp, Artificial Sequence
  source: /note="Description of Artificial Sequence: Synthetic oligonucleotide"
gcaacagcaagcacaagcagc

SEQ ID NO: 29352 - DNA, 21 bp, Artificial Sequence
  source: /note="Description of Artificial Sequence: Synthetic oligonucleotide"
gcaacagcaagctacaacgga

SEQ ID NO: 29353 - DNA, 21 bp, Artificial Sequence
  source: /note="Description of Artificial Sequence: Synthetic oligonucleotide"
gcaacagcagtccacgactac

SEQ ID NO: 29354 - DNA, 21 bp, Artificial Sequence
  source: /note="Description of Artificial Sequence: Synthetic oligonucleotide"
gcaacagaccacatgagccca

SEQ ID NO: 29355 - DNA, 21 bp, Artificial Sequence
  source: /note="Description of Artificial Sequence: Synthetic oligonucleotide"
gcaacagactaccaaagcatg

SEQ ID NO: 29356 - DNA, 21 bp, Artificial Sequence
  source: /note="Description of Artificial Sequence: Synthetic oligonucleotide"
gcaacagaagcaccactcaaa

SEQ ID NO: 29357 - DNA, 21 bp, Artificial Sequence
  source: /note="Description of Artificial Sequence: Synthetic oligonucleotide"
gcaacagaaggacacccatgg

SEQ ID NO: 29358 - DNA, 21 bp, Artificial Sequence
  source: /note="Description of Artificial Sequence: Synthetic oligonucleotide"
gcaacattcgtcacaagcaaa

SEQ ID NO: 29359 - DNA, 21 bp, Artificial Sequence
  source: /note="Description of Artificial Sequence: Synthetic oligonucleotide"
gcaacaggaggacacagccca

SEQ ID NO: 29360 - DNA, 21 bp, Artificial Sequence
  source: /note="Description of Artificial Sequence: Synthetic oligonucleotide"
gcaacaggaacaagcgcagga

SEQ ID NO: 29361 - DNA, 21 bp, Artificial Sequence
  source: /note="Description of Artificial Sequence: Synthetic oligonucleotide"
gcaacaggagtcctcatgagc

SEQ ID NO: 29362 - DNA, 21 bp, Artificial Sequence
  source: /note="Description of Artificial Sequence: Synthetic oligonucleotide"
gcaacaggagtccaaaactac

SEQ ID NO: 29363 - DNA, 21 bp, Artificial Sequence
  source: /note="Description of Artificial Sequence: Synthetic oligonucleotide"
gcaacacacatcctcaaactc

SEQ ID NO: 29364 - DNA, 21 bp, Artificial Sequence
  source: /note="Description of Artificial Sequence: Synthetic oligonucleotide"
gcaacacacagcctcctcagc

SEQ ID NO: 29365 - DNA, 21 bp, Artificial Sequence
  source: /note="Description of Artificial Sequence: Synthetic oligonucleotide"
gcaacacacgtctgcgtcagc

SEQ ID NO: 29366 - DNA, 21 bp, Artificial Sequence
  source: /note="Description of Artificial Sequence: Synthetic oligonucleotide"
gcaacaatcccaagaacacca

SEQ ID NO: 29367 - DNA, 21 bp, Artificial Sequence
  source: /note="Description of Artificial Sequence: Synthetic oligonucleotide"
gcaacaaaattccaaggaatg

SEQ ID NO: 29368 - DNA, 21 bp, Artificial Sequence
  source: /note="Description of Artificial Sequence: Synthetic oligonucleotide"
gcaacaaaaggaatcagcttc

SEQ ID NO: 29369 - DNA, 21 bp, Artificial Sequence
  source: /note="Description of Artificial Sequence: Synthetic oligonucleotide"
gcaacaaaacacgactgcaaa

SEQ ID NO: 29370 - DNA, 21 bp, Artificial Sequence
  source: /note="Description of Artificial Sequence: Synthetic oligonucleotide"
gcaacactccacagagaactc

SEQ ID NO: 29371 - DNA, 21 bp, Artificial Sequence
  source: /note="Description of Artificial Sequence: Synthetic oligonucleotide"
gcaacactcaaaatcccagtc

SEQ ID NO: 29372 - DNA, 21 bp, Artificial Sequence
  source: /note="Description of Artificial Sequence: Synthetic oligonucleotide"
gcaacactcagaatcgtcgaa

SEQ ID NO: 29373 - DNA, 21 bp, Artificial Sequence
  source: /note="Description of Artificial Sequence: Synthetic oligonucleotide"
gcaacactcagaccaaacgac

SEQ ID NO: 29374 - DNA, 21 bp, Artificial Sequence
  source: /note="Description of Artificial Sequence: Synthetic oligonucleotide"
gcaacactcagaacagcaaca

SEQ ID NO: 29375 - DNA, 21 bp, Artificial Sequence
  source: /note="Description of Artificial Sequence: Synthetic oligonucleotide"
gcaacactcagcacaaacgca

SEQ ID NO: 29376 - DNA, 21 bp, Artificial Sequence
  source: /note="Description of Artificial Sequence: Synthetic oligonucleotide"
gcaacactcacactcagcgca

SEQ ID NO: 29377 - DNA, 21 bp, Artificial Sequence
  source: /note="Description of Artificial Sequence: Synthetic oligonucleotide"
gcaacactcgtcagcgcagaa

SEQ ID NO: 29378 - DNA, 21 bp, Artificial Sequence
  source: /note="Description of Artificial Sequence: Synthetic oligonucleotide"
gcaacaatgccaagcacaatg

SEQ ID NO: 29379 - DNA, 21 bp, Artificial Sequence
  source: /note="Description of Artificial Sequence: Synthetic oligonucleotide"
gcaacaatgagaccaagagac

SEQ ID NO: 29380 - DNA, 21 bp, Artificial Sequence
  source: /note="Description of Artificial Sequence: Synthetic oligonucleotide"
gcaacaatgagcctcagcagc

SEQ ID NO: 29381 - DNA, 21 bp, Artificial Sequence
  source: /note="Description of Artificial Sequence: Synthetic oligonucleotide"
gcaacaatgagcatgagagga

SEQ ID NO: 29382 - DNA, 21 bp, Artificial Sequence
  source: /note="Description of Artificial Sequence: Synthetic oligonucleotide"
gcaacaatggtcacaacaagc

SEQ ID NO: 29383 - DNA, 21 bp, Artificial Sequence
  source: /note="Description of Artificial Sequence: Synthetic oligonucleotide"
gcaacaaacgcacaccaaagc

SEQ ID NO: 29384 - DNA, 21 bp, Artificial Sequence
  source: /note="Description of Artificial Sequence: Synthetic oligonucleotide"
gcaacaaacagattcccaagc

SEQ ID NO: 29385 - DNA, 21 bp, Artificial Sequence
  source: /note="Description of Artificial Sequence: Synthetic oligonucleotide"
gcaacaaacagcagcgcaaca

SEQ ID NO: 29386 - DNA, 21 bp, Artificial Sequence
  source: /note="Description of Artificial Sequence: Synthetic oligonucleotide"
gcaacaaacacaagaatcgca

SEQ ID NO: 29387 - DNA, 21 bp, Artificial Sequence
  source: /note="Description of Artificial Sequence: Synthetic oligonucleotide"
gcaacaccactcagaacaagc

SEQ ID NO: 29388 - DNA, 21 bp, Artificial Sequence
  source: /note="Description of Artificial Sequence: Synthetic oligonucleotide"
gcaacaccaccaatgcaaaac

SEQ ID NO: 29389 - DNA, 21 bp, Artificial Sequence
  source: /note="Description of Artificial Sequence: Synthetic oligonucleotide"
gcaacaccaagcgcagcaatc

SEQ ID NO: 29390 - DNA, 21 bp, Artificial Sequence
  source: /note="Description of Artificial Sequence: Synthetic oligonucleotide"
gcaacaccaacactcagcgca

SEQ ID NO: 29391 - DNA, 21 bp, Artificial Sequence
  source: /note="Description of Artificial Sequence: Synthetic oligonucleotide"
gcaacaccagtcccacaccca

SEQ ID NO: 29392 - DNA, 21 bp, Artificial Sequence
  source: /note="Description of Artificial Sequence: Synthetic oligonucleotide"
gcaacacaaaacctcccacca

SEQ ID NO: 29393 - DNA, 21 bp, Artificial Sequence
  source: /note="Description of Artificial Sequence: Synthetic oligonucleotide"
gcaacacaaagaatcgtctac

SEQ ID NO: 29394 - DNA, 21 bp, Artificial Sequence
  source: /note="Description of Artificial Sequence: Synthetic oligonucleotide"
gcaacacaatacggaatgaac

SEQ ID NO: 29395 - DNA, 21 bp, Artificial Sequence
  source: /note="Description of Artificial Sequence: Synthetic oligonucleotide"
gcaacaagagcagaaagcagc

SEQ ID NO: 29396 - DNA, 21 bp, Artificial Sequence
  source: /note="Description of Artificial Sequence: Synthetic oligonucleotide"
gcaacaagactcccagacagc

SEQ ID NO: 29397 - DNA, 21 bp, Artificial Sequence
  source: /note="Description of Artificial Sequence: Synthetic oligonucleotide"
gcaacaagactcacagaaaaa

SEQ ID NO: 29398 - DNA, 21 bp, Artificial Sequence
  source: /note="Description of Artificial Sequence: Synthetic oligonucleotide"
gcaacaagaccacaagcagac

SEQ ID NO: 29399 - DNA, 21 bp, Artificial Sequence
  source: /note="Description of Artificial Sequence: Synthetic oligonucleotide"
gcaacaagaacaagcctcgaa

SEQ ID NO: 29400 - DNA, 21 bp, Artificial Sequence
  source: /note="Description of Artificial Sequence: Synthetic oligonucleotide"
gcaacaagcatcacaaaaagc

SEQ ID NO: 29401 - DNA, 21 bp, Artificial Sequence
  source: /note="Description of Artificial Sequence: Synthetic oligonucleotide"
gcaacaagccaaatgaacttc

SEQ ID NO: 29402 - DNA, 21 bp, Artificial Sequence
  source: /note="Description of Artificial Sequence: Synthetic oligonucleotide"
gcaacaagcacactcaacctc

SEQ ID NO: 29403 - DNA, 21 bp, Artificial Sequence
  source: /note="Description of Artificial Sequence: Synthetic oligonucleotide"
gcaacaagcacaatgacaaca

SEQ ID NO: 29404 - DNA, 21 bp, Artificial Sequence
  source: /note="Description of Artificial Sequence: Synthetic oligonucleotide"
gcaacaagcacagtcttcaga

SEQ ID NO: 29405 - DNA, 21 bp, Artificial Sequence
  source: /note="Description of Artificial Sequence: Synthetic oligonucleotide"
gcaacaacagcaggaagcaac

SEQ ID NO: 29406 - DNA, 21 bp, Artificial Sequence
  source: /note="Description of Artificial Sequence: Synthetic oligonucleotide"
gcaacaacagcaatgggagaa

SEQ ID NO: 29407 - DNA, 21 bp, Artificial Sequence
  source: /note="Description of Artificial Sequence: Synthetic oligonucleotide"
gcaacaacaggaccaccatgc

SEQ ID NO: 29408 - DNA, 21 bp, Artificial Sequence
  source: /note="Description of Artificial Sequence: Synthetic oligonucleotide"
gcaacaacaaaagacacaaca

SEQ ID NO: 29409 - DNA, 21 bp, Artificial Sequence
  source: /note="Description of Artificial Sequence: Synthetic oligonucleotide"
gcaacaacactcatcagacca

SEQ ID NO: 29410 - DNA, 21 bp, Artificial Sequence
  source: /note="Description of Artificial Sequence: Synthetic oligonucleotide"
gcaacaacaagcagaagcagc

SEQ ID NO: 29411 - DNA, 21 bp, Artificial Sequence
  source: /note="Description of Artificial Sequence: Synthetic oligonucleotide"
gcaacaacagtcgcaagcaga

SEQ ID NO: 29412 - DNA, 21 bp, Artificial Sequence
  source: /note="Description of Artificial Sequence: Synthetic oligonucleotide"
gcaacagtcatgccaacagca

SEQ ID NO: 29413 - DNA, 21 bp, Artificial Sequence
  source: /note="Description of Artificial Sequence: Synthetic oligonucleotide"
gcaacagtcatgacactccca

SEQ ID NO: 29414 - DNA, 21 bp, Artificial Sequence
  source: /note="Description of Artificial Sequence: Synthetic oligonucleotide"
gcaacagtcaacccagcagtc

SEQ ID NO: 29415 - DNA, 21 bp, Artificial Sequence
  source: /note="Description of Artificial Sequence: Synthetic oligonucleotide"
gcaacagtcccacaaagaaca

SEQ ID NO: 29416 - DNA, 21 bp, Artificial Sequence
  source: /note="Description of Artificial Sequence: Synthetic oligonucleotide"
gcaacagtcagaacaatgctc

SEQ ID NO: 29417 - DNA, 21 bp, Artificial Sequence
  source: /note="Description of Artificial Sequence: Synthetic oligonucleotide"
gcaacagtcagcgacacactc

SEQ ID NO: 29418 - DNA, 21 bp, Artificial Sequence
  source: /note="Description of Artificial Sequence: Synthetic oligonucleotide"
gcaacagtcagcagcctcaca

SEQ ID NO: 29419 - DNA, 21 bp, Artificial Sequence
  source: /note="Description of Artificial Sequence: Synthetic oligonucleotide"
gcaacatggccatacaaagaa

SEQ ID NO: 29420 - DNA, 21 bp, Artificial Sequence
  source: /note="Description of Artificial Sequence: Synthetic oligonucleotide"
gcaacatacgcaagaaacgaa

SEQ ID NO: 29421 - DNA, 21 bp, Artificial Sequence
  source: /note="Description of Artificial Sequence: Synthetic oligonucleotide"
gcaacatacacagcaacagca

SEQ ID NO: 29422 - DNA, 21 bp, Artificial Sequence
  source: /note="Description of Artificial Sequence: Synthetic oligonucleotide"
gcagtcgcaggaacactcaga

SEQ ID NO: 29423 - DNA, 21 bp, Artificial Sequence
  source: /note="Description of Artificial Sequence: Synthetic oligonucleotide"
gcagtcgcactcaacacaaca

SEQ ID NO: 29424 - DNA, 21 bp, Artificial Sequence
  source: /note="Description of Artificial Sequence: Synthetic oligonucleotide"
gcagtcgcacaaatgggaatc

SEQ ID NO: 29425 - DNA, 21 bp, Artificial Sequence
  source: /note="Description of Artificial Sequence: Synthetic oligonucleotide"
gcagtcgcagtcgacttcgtc

SEQ ID NO: 29426 - DNA, 21 bp, Artificial Sequence
  source: /note="Description of Artificial Sequence: Synthetic oligonucleotide"
gcagtcgaccacgaaggactc

SEQ ID NO: 29427 - DNA, 21 bp, Artificial Sequence
  source: /note="Description of Artificial Sequence: Synthetic oligonucleotide"
gcagtcgacccaggaaaccca

SEQ ID NO: 29428 - DNA, 21 bp, Artificial Sequence
  source: /note="Description of Artificial Sequence: Synthetic oligonucleotide"
gcagtcgacagaagcgaaatc

SEQ ID NO: 29429 - DNA, 21 bp, Artificial Sequence
  source: /note="Description of Artificial Sequence: Synthetic oligonucleotide"
gcagtcgaatgcatgccacca

SEQ ID NO: 29430 - DNA, 21 bp, Artificial Sequence
  source: /note="Description of Artificial Sequence: Synthetic oligonucleotide"
gcagtcgaaccaatgtgggaa

SEQ ID NO: 29431 - DNA, 21 bp, Artificial Sequence
  source: /note="Description of Artificial Sequence: Synthetic oligonucleotide"
gcagtcgaaacaggatacaca

SEQ ID NO: 29432 - DNA, 21 bp, Artificial Sequence
  source: /note="Description of Artificial Sequence: Synthetic oligonucleotide"
gcagtcttcgcaagactccca

SEQ ID NO: 29433 - DNA, 21 bp, Artificial Sequence
  source: /note="Description of Artificial Sequence: Synthetic oligonucleotide"
gcagtcggagaaagcgaagtc

SEQ ID NO: 29434 - DNA, 21 bp, Artificial Sequence
  source: /note="Description of Artificial Sequence: Synthetic oligonucleotide"
gcagtcggaaacagcctctac

SEQ ID NO: 29435 - DNA, 21 bp, Artificial Sequence
  source: /note="Description of Artificial Sequence: Synthetic oligonucleotide"
gcagtcggacaaaacatgaga

SEQ ID NO: 29436 - DNA, 21 bp, Artificial Sequence
  source: /note="Description of Artificial Sequence: Synthetic oligonucleotide"
gcagtccacaaaatggacatg

SEQ ID NO: 29437 - DNA, 21 bp, Artificial Sequence
  source: /note="Description of Artificial Sequence: Synthetic oligonucleotide"
gcagtccaccaactcacactc

SEQ ID NO: 29438 - DNA, 21 bp, Artificial Sequence
  source: /note="Description of Artificial Sequence: Synthetic oligonucleotide"
gcagtccacagagaaaacgtc

SEQ ID NO: 29439 - DNA, 21 bp, Artificial Sequence
  source: /note="Description of Artificial Sequence: Synthetic oligonucleotide"
gcagtcatcggaggaatgaca

SEQ ID NO: 29440 - DNA, 21 bp, Artificial Sequence
  source: /note="Description of Artificial Sequence: Synthetic oligonucleotide"
gcagtcaaaggaatgccactc

SEQ ID NO: 29441 - DNA, 21 bp, Artificial Sequence
  source: /note="Description of Artificial Sequence: Synthetic oligonucleotide"
gcagtcaaacaactcatcgtc

SEQ ID NO: 29442 - DNA, 21 bp, Artificial Sequence
  source: /note="Description of Artificial Sequence: Synthetic oligonucleotide"
gcagtcctccacacactcgga

SEQ ID NO: 29443 - DNA, 21 bp, Artificial Sequence
  source: /note="Description of Artificial Sequence: Synthetic oligonucleotide"
gcagtcctcaaaaacagagac

SEQ ID NO: 29444 - DNA, 21 bp, Artificial Sequence
  source: /note="Description of Artificial Sequence: Synthetic oligonucleotide"
gcagtcctcaacaaagaagac

SEQ ID NO: 29445 - DNA, 21 bp, Artificial Sequence
  source: /note="Description of Artificial Sequence: Synthetic oligonucleotide"
gcagtcctcaacagcgcagac

SEQ ID NO: 29446 - DNA, 21 bp, Artificial Sequence
  source: /note="Description of Artificial Sequence: Synthetic oligonucleotide"
gcagtcctcgtcccacacgca

SEQ ID NO: 29447 - DNA, 21 bp, Artificial Sequence
  source: /note="Description of Artificial Sequence: Synthetic oligonucleotide"
gcagtcctcgtcagagaagac

SEQ ID NO: 29448 - DNA, 21 bp, Artificial Sequence
  source: /note="Description of Artificial Sequence: Synthetic oligonucleotide"
gcagtcatgggaagaagcgaa

SEQ ID NO: 29449 - DNA, 21 bp, Artificial Sequence
  source: /note="Description of Artificial Sequence: Synthetic oligonucleotide"
gcagtcatgccaagaacacca

SEQ ID NO: 29450 - DNA, 21 bp, Artificial Sequence
  source: /note="Description of Artificial Sequence: Synthetic oligonucleotide"
gcagtcatgagaatcgcacca

SEQ ID NO: 29451 - DNA, 21 bp, Artificial Sequence
  source: /note="Description of Artificial Sequence: Synthetic oligonucleotide"
gcagtcaacgcagcacaagca

SEQ ID NO: 29452 - DNA, 21 bp, Artificial Sequence
  source: /note="Description of Artificial Sequence: Synthetic oligonucleotide"
gcagtcaacttcgacgtcatc

SEQ ID NO: 29453 - DNA, 21 bp, Artificial Sequence
  source: /note="Description of Artificial Sequence: Synthetic oligonucleotide"
gcagtcaacccaccagaactc

SEQ ID NO: 29454 - DNA, 21 bp, Artificial Sequence
  source: /note="Description of Artificial Sequence: Synthetic oligonucleotide"
gcagtcaacagagtcccactc

SEQ ID NO: 29455 - DNA, 21 bp, Artificial Sequence
  source: /note="Description of Artificial Sequence: Synthetic oligonucleotide"
gcagtcccaggaccaaaaagc

SEQ ID NO: 29456 - DNA, 21 bp, Artificial Sequence
  source: /note="Description of Artificial Sequence: Synthetic oligonucleotide"
gcagtcccactcctcctcaca

SEQ ID NO: 29457 - DNA, 21 bp, Artificial Sequence
  source: /note="Description of Artificial Sequence: Synthetic oligonucleotide"
gcagtcccaatgagattccca

SEQ ID NO: 29458 - DNA, 21 bp, Artificial Sequence
  source: /note="Description of Artificial Sequence: Synthetic oligonucleotide"
gcagtcccaagccacgcacaa

SEQ ID NO: 29459 - DNA, 21 bp, Artificial Sequence
  source: /note="Description of Artificial Sequence: Synthetic oligonucleotide"
gcagtcccagtcagccacgca

SEQ ID NO: 29460 - DNA, 21 bp, Artificial Sequence
  source: /note="Description of Artificial Sequence: Synthetic oligonucleotide"
gcagtccaaacacacggattc

SEQ ID NO: 29461 - DNA, 21 bp, Artificial Sequence
  source: /note="Description of Artificial Sequence: Synthetic oligonucleotide"
gcagtccaaacaacagaccac

SEQ ID NO: 29462 - DNA, 21 bp, Artificial Sequence
  source: /note="Description of Artificial Sequence: Synthetic oligonucleotide"
gcagtcagagcaagccaacaa

SEQ ID NO: 29463 - DNA, 21 bp, Artificial Sequence
  source: /note="Description of Artificial Sequence: Synthetic oligonucleotide"
gcagtcagagcaagcacacca

SEQ ID NO: 29464 - DNA, 21 bp, Artificial Sequence
  source: /note="Description of Artificial Sequence: Synthetic oligonucleotide"
gcagtcagagacagcgtcctc

SEQ ID NO: 29465 - DNA, 21 bp, Artificial Sequence
  source: /note="Description of Artificial Sequence: Synthetic oligonucleotide"
gcagtcagacaccaaggagac

SEQ ID NO: 29466 - DNA, 21 bp, Artificial Sequence
  source: /note="Description of Artificial Sequence: Synthetic oligonucleotide"
gcagtcagactcaaaatggaa

SEQ ID NO: 29467 - DNA, 21 bp, Artificial Sequence
  source: /note="Description of Artificial Sequence: Synthetic oligonucleotide"
gcagtcagaccaccaccacca

SEQ ID NO: 29468 - DNA, 21 bp, Artificial Sequence
  source: /note="Description of Artificial Sequence: Synthetic oligonucleotide"
gcagtcagaagagacgacgca

SEQ ID NO: 29469 - DNA, 21 bp, Artificial Sequence
  source: /note="Description of Artificial Sequence: Synthetic oligonucleotide"
gcagtcagaagcctcacagtc

SEQ ID NO: 29470 - DNA, 21 bp, Artificial Sequence
  source: /note="Description of Artificial Sequence: Synthetic oligonucleotide"
gcagtcagaacaaacccactc

SEQ ID NO: 29471 - DNA, 21 bp, Artificial Sequence
  source: /note="Description of Artificial Sequence: Synthetic oligonucleotide"
gcagtcagcggacacagcctc

SEQ ID NO: 29472 - DNA, 21 bp, Artificial Sequence
  source: /note="Description of Artificial Sequence: Synthetic oligonucleotide"
gcagtcagccacgcaagcgac

SEQ ID NO: 29473 - DNA, 21 bp, Artificial Sequence
  source: /note="Description of Artificial Sequence: Synthetic oligonucleotide"
gcagtcagcccatacagcctc

SEQ ID NO: 29474 - DNA, 21 bp, Artificial Sequence
  source: /note="Description of Artificial Sequence: Synthetic oligonucleotide"
gcagtcagcagagcaggagga

SEQ ID NO: 29475 - DNA, 21 bp, Artificial Sequence
  source: /note="Description of Artificial Sequence: Synthetic oligonucleotide"
gcagtcagcagaccaaacagc

SEQ ID NO: 29476 - DNA, 21 bp, Artificial Sequence
  source: /note="Description of Artificial Sequence: Synthetic oligonucleotide"
gcagtcacaaacagcatgatc

SEQ ID NO: 29477 - DNA, 21 bp, Artificial Sequence
  source: /note="Description of Artificial Sequence: Synthetic oligonucleotide"
gcagtcacaccactcccactc

SEQ ID NO: 29478 - DNA, 21 bp, Artificial Sequence
  source: /note="Description of Artificial Sequence: Synthetic oligonucleotide"
gcagtcacaagcggattcaga

SEQ ID NO: 29479 - DNA, 21 bp, Artificial Sequence
  source: /note="Description of Artificial Sequence: Synthetic oligonucleotide"
gcagtcacagtcaacgcatac

SEQ ID NO: 29480 - DNA, 21 bp, Artificial Sequence
  source: /note="Description of Artificial Sequence: Synthetic oligonucleotide"
gcagtcgtcggagcaatcctc

SEQ ID NO: 29481 - DNA, 21 bp, Artificial Sequence
  source: /note="Description of Artificial Sequence: Synthetic oligonucleotide"
gcagtcgtcagaaaccaaagc

SEQ ID NO: 29482 - DNA, 21 bp, Artificial Sequence
  source: /note="Description of Artificial Sequence: Synthetic oligonucleotide"
gcagtctacaacgacgtctgc

SEQ ID NO: 29483 - DNA, 21 bp, Artificial Sequence
  source: /note="Description of Artificial Sequence: Synthetic oligonucleotide"
gcagtctacagcagcgaacca

SEQ ID NO: 29484 - DNA, 21 bp, Artificial Sequence
  source: /note="Description of Artificial Sequence: Synthetic oligonucleotide"
gcatggaacccaaacgaaaaa

SEQ ID NO: 29485 - DNA, 21 bp, Artificial Sequence
  source: /note="Description of Artificial Sequence: Synthetic oligonucleotide"
gcatggccaaacagcctcaaa

SEQ ID NO: 29486 - DNA, 21 bp, Artificial Sequence
  source: /note="Description of Artificial Sequence: Synthetic oligonucleotide"
gcatggacacaacaaggacca

SEQ ID NO: 29487 - DNA, 21 bp, Artificial Sequence
  source: /note="Description of Artificial Sequence: Synthetic oligonucleotide"
gcatacgcaatcctcgaagca

SEQ ID NO: 29488 - DNA, 21 bp, Artificial Sequence
  source: /note="Description of Artificial Sequence: Synthetic oligonucleotide"
gcatacgcaaaagcaatcgca

SEQ ID NO: 29489 - DNA, 21 bp, Artificial Sequence
  source: /note="Description of Artificial Sequence: Synthetic oligonucleotide"
gcatacgacaaaagcctcgtc

SEQ ID NO: 29490 - DNA, 21 bp, Artificial Sequence
  source: /note="Description of Artificial Sequence: Synthetic oligonucleotide"
gcatacgacagagcattcagc

SEQ ID NO: 29491 - DNA, 21 bp, Artificial Sequence
  source: /note="Description of Artificial Sequence: Synthetic oligonucleotide"
gcatacgacagcgcaccatac

SEQ ID NO: 29492 - DNA, 21 bp, Artificial Sequence
  source: /note="Description of Artificial Sequence: Synthetic oligonucleotide"
gcatacgacagcagagcagca

SEQ ID NO: 29493 - DNA, 21 bp, Artificial Sequence
  source: /note="Description of Artificial Sequence: Synthetic oligonucleotide"
gcatacgaagcaagaacacac

SEQ ID NO: 29494 - DNA, 21 bp, Artificial Sequence
  source: /note="Description of Artificial Sequence: Synthetic oligonucleotide"
gcatacgaaggaacactcagc

SEQ ID NO: 29495 - DNA, 21 bp, Artificial Sequence
  source: /note="Description of Artificial Sequence: Synthetic oligonucleotide"
gcatacgaaccaatcagcaaa

SEQ ID NO: 29496 - DNA, 21 bp, Artificial Sequence
  source: /note="Description of Artificial Sequence: Synthetic oligonucleotide"
gcatacttcgaagtccaacca

SEQ ID NO: 29497 - DNA, 21 bp, Artificial Sequence
  source: /note="Description of Artificial Sequence: Synthetic oligonucleotide"
gcatacggaggaccaagcgca

SEQ ID NO: 29498 - DNA, 21 bp, Artificial Sequence
  source: /note="Description of Artificial Sequence: Synthetic oligonucleotide"
gcatacggagtcacagaaaaa

SEQ ID NO: 29499 - DNA, 21 bp, Artificial Sequence
  source: /note="Description of Artificial Sequence: Synthetic oligonucleotide"
gcataccacgaaaaaggagca

SEQ ID NO: 29500 - DNA, 21 bp, Artificial Sequence
  source: /note="Description of Artificial Sequence: Synthetic oligonucleotide"
gcataccacagagcagacgca

SEQ ID NO: 29501 - DNA, 21 bp, Artificial Sequence
  source: /note="Description of Artificial Sequence: Synthetic oligonucleotide"
gcataccacgtcagagtcgac

SEQ ID NO: 29502 - DNA, 21 bp, Artificial Sequence
  source: /note="Description of Artificial Sequence: Synthetic oligonucleotide"
gcatacatccaaggaagcctc

SEQ ID NO: 29503 - DNA, 21 bp, Artificial Sequence
  source: /note="Description of Artificial Sequence: Synthetic oligonucleotide"
gcatacaaacaacaaatgagc

SEQ ID NO: 29504 - DNA, 21 bp, Artificial Sequence
  source: /note="Description of Artificial Sequence: Synthetic oligonucleotide"
gcatacatgccaagcgcatac

SEQ ID NO: 29505 - DNA, 21 bp, Artificial Sequence
  source: /note="Description of Artificial Sequence: Synthetic oligonucleotide"
gcatacaacggaacaagacca

SEQ ID NO: 29506 - DNA, 21 bp, Artificial Sequence
  source: /note="Description of Artificial Sequence: Synthetic oligonucleotide"
gcatacaaccaaccaggagca

SEQ ID NO: 29507 - DNA, 21 bp, Artificial Sequence
  source: /note="Description of Artificial Sequence: Synthetic oligonucleotide"
gcatacaacacaacaaaacaa

SEQ ID NO: 29508 - DNA, 21 bp, Artificial Sequence
  source: /note="Description of Artificial Sequence: Synthetic oligonucleotide"
gcatacccattcaaagaacac

SEQ ID NO: 29509 - DNA, 21 bp, Artificial Sequence
  source: /note="Description of Artificial Sequence: Synthetic oligonucleotide"
gcatacccaagagaaagcgga

SEQ ID NO: 29510 - DNA, 21 bp, Artificial Sequence
  source: /note="Description of Artificial Sequence: Synthetic oligonucleotide"
gcatacccaagcaacgcaagc

SEQ ID NO: 29511 - DNA, 21 bp, Artificial Sequence
  source: /note="Description of Artificial Sequence: Synthetic oligonucleotide"
gcatacccaagcagccaattc

SEQ ID NO: 29512 - DNA, 21 bp, Artificial Sequence
  source: /note="Description of Artificial Sequence: Synthetic oligonucleotide"
gcatacccaacaagcttcgca

SEQ ID NO: 29513 - DNA, 21 bp, Artificial Sequence
  source: /note="Description of Artificial Sequence: Synthetic oligonucleotide"
gcatacagagcaagcagcgaa

SEQ ID NO: 29514 - DNA, 21 bp, Artificial Sequence
  source: /note="Description of Artificial Sequence: Synthetic oligonucleotide"
gcatacagagacagcacaaca

SEQ ID NO: 29515 - DNA, 21 bp, Artificial Sequence
  source: /note="Description of Artificial Sequence: Synthetic oligonucleotide"
gcatacagaggaagcacaaca

SEQ ID NO: 29516 - DNA, 21 bp, Artificial Sequence
  source: /note="Description of Artificial Sequence: Synthetic oligonucleotide"
gcatacagcgacagccaaaga

SEQ ID NO: 29517 - DNA, 21 bp, Artificial Sequence
  source: /note="Description of Artificial Sequence: Synthetic oligonucleotide"
gcatacagcaaaagcgcagac

SEQ ID NO: 29518 - DNA, 21 bp, Artificial Sequence
  source: /note="Description of Artificial Sequence: Synthetic oligonucleotide"
gcatacagcaacagaacaatg

SEQ ID NO: 29519 - DNA, 21 bp, Artificial Sequence
  source: /note="Description of Artificial Sequence: Synthetic oligonucleotide"
gcatacagcccaacaagaaac

SEQ ID NO: 29520 - DNA, 21 bp, Artificial Sequence
  source: /note="Description of Artificial Sequence: Synthetic oligonucleotide"
gcatacgtcggaacaacacca

SEQ ID NO: 29521 - DNA, 21 bp, Artificial Sequence
  source: /note="Description of Artificial Sequence: Synthetic oligonucleotide"
gcatacgtcaacacaccacca

SEQ ID NO: 29522 - DNA, 21 bp, Artificial Sequence
  source: /note="Description of Artificial Sequence: Synthetic oligonucleotide"
gcatacgtcacaccaagcagc

SEQ ID NO: 29523 - DNA, 21 bp, Artificial Sequence
  source: /note="Description of Artificial Sequence: Synthetic oligonucleotide"
tgcgcagcaagaagcacagca

SEQ ID NO: 29524 - DNA, 21 bp, Artificial Sequence
  source: /note="Description of Artificial Sequence: Synthetic oligonucleotide"
tgcgcagcaagccaaagcgaa

SEQ ID NO: 29525 - DNA, 21 bp, Artificial Sequence
  source: /note="Description of Artificial Sequence: Synthetic oligonucleotide"
tgcgcaaaaacaacagcaaac

SEQ ID NO: 29526 - DNA, 21 bp, Artificial Sequence
  source: /note="Description of Artificial Sequence: Synthetic oligonucleotide"
tgcgcactcggagcaagctac

SEQ ID NO: 29527 - DNA, 21 bp, Artificial Sequence
  source: /note="Description of Artificial Sequence: Synthetic oligonucleotide"
tgcgcaccactcagaccactc

SEQ ID NO: 29528 - DNA, 21 bp, Artificial Sequence
  source: /note="Description of Artificial Sequence: Synthetic oligonucleotide"
tgcgcaagagacacacaccca

SEQ ID NO: 29529 - DNA, 21 bp, Artificial Sequence
  source: /note="Description of Artificial Sequence: Synthetic oligonucleotide"
tgcgcaagaatgaaagaagtc

SEQ ID NO: 29530 - DNA, 21 bp, Artificial Sequence
  source: /note="Description of Artificial Sequence: Synthetic oligonucleotide"
tgcgcaagaagcttcgaagtc

SEQ ID NO: 29531 - DNA, 21 bp, Artificial Sequence
  source: /note="Description of Artificial Sequence: Synthetic oligonucleotide"
tgcgcagtcttccaaacagga

SEQ ID NO: 29532 - DNA, 21 bp, Artificial Sequence
  source: /note="Description of Artificial Sequence: Synthetic oligonucleotide"
tgcgcagtcggagtcagaagc

SEQ ID NO: 29533 - DNA, 21 bp, Artificial Sequence
  source: /note="Description of Artificial Sequence: Synthetic oligonucleotide"
tgctgcgcaccaggactcagc

SEQ ID NO: 29534 - DNA, 21 bp, Artificial Sequence
  source: /note="Description of Artificial Sequence: Synthetic oligonucleotide"
tgcgacgcactcaacctcgca

SEQ ID NO: 29535 - DNA, 21 bp, Artificial Sequence
  source: /note="Description of Artificial Sequence: Synthetic oligonucleotide"
tgcgacagcagcaacagcagc

SEQ ID NO: 29536 - DNA, 21 bp, Artificial Sequence
  source: /note="Description of Artificial Sequence: Synthetic oligonucleotide"
tgcgaagcaagcagcaaagtc

SEQ ID NO: 29537 - DNA, 21 bp, Artificial Sequence
  source: /note="Description of Artificial Sequence: Synthetic oligonucleotide"
tgcgaaaaactcgtcagagtc

SEQ ID NO: 29538 - DNA, 21 bp, Artificial Sequence
  source: /note="Description of Artificial Sequence: Synthetic oligonucleotide"
tgcgaaatggaagcaacactc

SEQ ID NO: 29539 - DNA, 21 bp, Artificial Sequence
  source: /note="Description of Artificial Sequence: Synthetic oligonucleotide"
tgcgaaccatgccaagaactc

SEQ ID NO: 29540 - DNA, 21 bp, Artificial Sequence
  source: /note="Description of Artificial Sequence: Synthetic oligonucleotide"
tgcgaaccatacgaaagaagc

SEQ ID NO: 29541 - DNA, 21 bp, Artificial Sequence
  source: /note="Description of Artificial Sequence: Synthetic oligonucleotide"
tgcgaaacaatcacactcgca

SEQ ID NO: 29542 - DNA, 21 bp, Artificial Sequence
  source: /note="Description of Artificial Sequence: Synthetic oligonucleotide"
tgcgaaacatggcaaatgcac

SEQ ID NO: 29543 - DNA, 21 bp, Artificial Sequence
  source: /note="Description of Artificial Sequence: Synthetic oligonucleotide"
tgcgaagtcgaaaaaaaagaa

SEQ ID NO: 29544 - DNA, 21 bp, Artificial Sequence
  source: /note="Description of Artificial Sequence: Synthetic oligonucleotide"
tgcgaagtcggagcaccaagc

SEQ ID NO: 29545 - DNA, 21 bp, Artificial Sequence
  source: /note="Description of Artificial Sequence: Synthetic oligonucleotide"
tgcttcccaaaaacagtcagc

SEQ ID NO: 29546 - DNA, 21 bp, Artificial Sequence
  source: /note="Description of Artificial Sequence: Synthetic oligonucleotide"
tgcttcacaagcgaaagagga

SEQ ID NO: 29547 - DNA, 21 bp, Artificial Sequence
  source: /note="Description of Artificial Sequence: Synthetic oligonucleotide"
tgcggactcgtcatctgcgac

SEQ ID NO: 29548 - DNA, 21 bp, Artificial Sequence
  source: /note="Description of Artificial Sequence: Synthetic oligonucleotide"
tgcggaatgagacaaagcagc

SEQ ID NO: 29549 - DNA, 21 bp, Artificial Sequence
  source: /note="Description of Artificial Sequence: Synthetic oligonucleotide"
tgcggaaaccacgaagcaagc

SEQ ID NO: 29550 - DNA, 21 bp, Artificial Sequence
  source: /note="Description of Artificial Sequence: Synthetic oligonucleotide"
tgcggaagcttcatcacacac

SEQ ID NO: 29551 - DNA, 21 bp, Artificial Sequence
  source: /note="Description of Artificial Sequence: Synthetic oligonucleotide"
tgccacccaaaaatggaattc

SEQ ID NO: 29552 - DNA, 21 bp, Artificial Sequence
  source: /note="Description of Artificial Sequence: Synthetic oligonucleotide"
tgccacacagcaagctgcagc

SEQ ID NO: 29553 - DNA, 21 bp, Artificial Sequence
  source: /note="Description of Artificial Sequence: Synthetic oligonucleotide"
tgcatcgcaagaccagaatgc

SEQ ID NO: 29554 - DNA, 21 bp, Artificial Sequence
  source: /note="Description of Artificial Sequence: Synthetic oligonucleotide"
tgcatccaaagcagcctccac

SEQ ID NO: 29555 - DNA, 21 bp, Artificial Sequence
  source: /note="Description of Artificial Sequence: Synthetic oligonucleotide"
tgcatcgtcgtcgaaacagtc

SEQ ID NO: 29556 - DNA, 21 bp, Artificial Sequence
  source: /note="Description of Artificial Sequence: Synthetic oligonucleotide"
tgcaaagaagtcccaagagca

SEQ ID NO: 29557 - DNA, 21 bp, Artificial Sequence
  source: /note="Description of Artificial Sequence: Synthetic oligonucleotide"
tgcaaaggaacacacaactac

SEQ ID NO: 29558 - DNA, 21 bp, Artificial Sequence
  source: /note="Description of Artificial Sequence: Synthetic oligonucleotide"
tgcaaacacggaacaccaatg

SEQ ID NO: 29559 - DNA, 21 bp, Artificial Sequence
  source: /note="Description of Artificial Sequence: Synthetic oligonucleotide"
tgcaaaagcaacagcacatgc

SEQ ID NO: 29560 - DNA, 21 bp, Artificial Sequence
  source: /note="Description of Artificial Sequence: Synthetic oligonucleotide"
tgcaaaagcagcatcggaagc

SEQ ID NO: 29561 - DNA, 21 bp, Artificial Sequence
  source: /note="Description of Artificial Sequence: Synthetic oligonucleotide"
tgcctcgaagactgcatgaga

SEQ ID NO: 29562 - DNA, 21 bp, Artificial Sequence
  source: /note="Description of Artificial Sequence: Synthetic oligonucleotide"
tgcctcgaaatcccaatcagc

SEQ ID NO: 29563 - DNA, 21 bp, Artificial Sequence
  source: /note="Description of Artificial Sequence: Synthetic oligonucleotide"
tgcctcgaaagcgacagacca

SEQ ID NO: 29564 - DNA, 21 bp, Artificial Sequence
  source: /note="Description of Artificial Sequence: Synthetic oligonucleotide"
tgcctcggaacacacatgctc

SEQ ID NO: 29565 - DNA, 21 bp, Artificial Sequence
  source: /note="Description of Artificial Sequence: Synthetic oligonucleotide"
tgcctcccagcagacagcgaa

SEQ ID NO: 29566 - DNA, 21 bp, Artificial Sequence
  source: /note="Description of Artificial Sequence: Synthetic oligonucleotide"
tgcctccaaacaggactcaca

SEQ ID NO: 29567 - DNA, 21 bp, Artificial Sequence
  source: /note="Description of Artificial Sequence: Synthetic oligonucleotide"
tgcctcagaacaagcgtccca

SEQ ID NO: 29568 - DNA, 21 bp, Artificial Sequence
  source: /note="Description of Artificial Sequence: Synthetic oligonucleotide"
tgcctcagcagcggaagcgtc

SEQ ID NO: 29569 - DNA, 21 bp, Artificial Sequence
  source: /note="Description of Artificial Sequence: Synthetic oligonucleotide"
tgcatggcagaactcatggac

SEQ ID NO: 29570 - DNA, 21 bp, Artificial Sequence
  source: /note="Description of Artificial Sequence: Synthetic oligonucleotide"
tgcatggcagaactcagagac

SEQ ID NO: 29571 - DNA, 21 bp, Artificial Sequence
  source: /note="Description of Artificial Sequence: Synthetic oligonucleotide"
tgcatgccaagaacatgcgaa

SEQ ID NO: 29572 - DNA, 21 bp, Artificial Sequence
  source: /note="Description of Artificial Sequence: Synthetic oligonucleotide"
tgcatgacaatcccaaacgca

SEQ ID NO: 29573 - DNA, 21 bp, Artificial Sequence
  source: /note="Description of Artificial Sequence: Synthetic oligonucleotide"
tgcaacgcaagctgcggaaga

SEQ ID NO: 29574 - DNA, 21 bp, Artificial Sequence
  source: /note="Description of Artificial Sequence: Synthetic oligonucleotide"
tgcaacgaaatcacagaacca

SEQ ID NO: 29575 - DNA, 21 bp, Artificial Sequence
  source: /note="Description of Artificial Sequence: Synthetic oligonucleotide"
tgcaacccaaaaacaagcagc

SEQ ID NO: 29576 - DNA, 21 bp, Artificial Sequence
  source: /note="Description of Artificial Sequence: Synthetic oligonucleotide"
tgcaacagcagcagctgcaca

SEQ ID NO: 29577 - DNA, 21 bp, Artificial Sequence
  source: /note="Description of Artificial Sequence: Synthetic oligonucleotide"
tgcccagcagaaaaccaactc

SEQ ID NO: 29578 - DNA, 21 bp, Artificial Sequence
  source: /note="Description of Artificial Sequence: Synthetic oligonucleotide"
tgcccagcaaaaagctgcgga

SEQ ID NO: 29579 - DNA, 21 bp, Artificial Sequence
  source: /note="Description of Artificial Sequence: Synthetic oligonucleotide"
tgcccagacagataccaatgc

SEQ ID NO: 29580 - DNA, 21 bp, Artificial Sequence
  source: /note="Description of Artificial Sequence: Synthetic oligonucleotide"
tgcccactcgcaccatacagc

SEQ ID NO: 29581 - DNA, 21 bp, Artificial Sequence
  source: /note="Description of Artificial Sequence: Synthetic oligonucleotide"
tgcccactcgacagcacaatc

SEQ ID NO: 29582 - DNA, 21 bp, Artificial Sequence
  source: /note="Description of Artificial Sequence: Synthetic oligonucleotide"
tgcccactcggagacagacac

SEQ ID NO: 29583 - DNA, 21 bp, Artificial Sequence
  source: /note="Description of Artificial Sequence: Synthetic oligonucleotide"
tgcccaatggtctgcagcgca

SEQ ID NO: 29584 - DNA, 21 bp, Artificial Sequence
  source: /note="Description of Artificial Sequence: Synthetic oligonucleotide"
tgcccaccacaaccactccca

SEQ ID NO: 29585 - DNA, 21 bp, Artificial Sequence
  source: /note="Description of Artificial Sequence: Synthetic oligonucleotide"
tgcccaagaacaggactcaac

SEQ ID NO: 29586 - DNA, 21 bp, Artificial Sequence
  source: /note="Description of Artificial Sequence: Synthetic oligonucleotide"
tgcccaagcgaaagaatggga

SEQ ID NO: 29587 - DNA, 21 bp, Artificial Sequence
  source: /note="Description of Artificial Sequence: Synthetic oligonucleotide"
tgcccaagcatcctccactgc

SEQ ID NO: 29588 - DNA, 21 bp, Artificial Sequence
  source: /note="Description of Artificial Sequence: Synthetic oligonucleotide"
tgcccaagcagagcaccatgc

SEQ ID NO: 29589 - DNA, 21 bp, Artificial Sequence
  source: /note="Description of Artificial Sequence: Synthetic oligonucleotide"
tgcccaacaccaagcagctgc

SEQ ID NO: 29590 - DNA, 21 bp, Artificial Sequence
  source: /note="Description of Artificial Sequence: Synthetic oligonucleotide"
tgcccaacaacaaaaagcgca

SEQ ID NO: 29591 - DNA, 21 bp, Artificial Sequence
  source: /note="Description of Artificial Sequence: Synthetic oligonucleotide"
tgccaagcaagaagctgcatc

SEQ ID NO: 29592 - DNA, 21 bp, Artificial Sequence
  source: /note="Description of Artificial Sequence: Synthetic oligonucleotide"
tgcagagcaagcagcagccca

SEQ ID NO: 29593 - DNA, 21 bp, Artificial Sequence
  source: /note="Description of Artificial Sequence: Synthetic oligonucleotide"
tgcagagcagtcgaaagacca

SEQ ID NO: 29594 - DNA, 21 bp, Artificial Sequence
  source: /note="Description of Artificial Sequence: Synthetic oligonucleotide"
tgcagaatgatgaacagacca

SEQ ID NO: 29595 - DNA, 21 bp, Artificial Sequence
  source: /note="Description of Artificial Sequence: Synthetic oligonucleotide"
tgcagaatgaacgacctcgtc

SEQ ID NO: 29596 - DNA, 21 bp, Artificial Sequence
  source: /note="Description of Artificial Sequence: Synthetic oligonucleotide"
tgcagaagaacaatggacatg

SEQ ID NO: 29597 - DNA, 21 bp, Artificial Sequence
  source: /note="Description of Artificial Sequence: Synthetic oligonucleotide"
tgcagaagcgaaaacaaactc

SEQ ID NO: 29598 - DNA, 21 bp, Artificial Sequence
  source: /note="Description of Artificial Sequence: Synthetic oligonucleotide"
tgcagaagcggaggagaagca

SEQ ID NO: 29599 - DNA, 21 bp, Artificial Sequence
  source: /note="Description of Artificial Sequence: Synthetic oligonucleotide"
tgcagcgcactccacaaatgc

SEQ ID NO: 29600 - DNA, 21 bp, Artificial Sequence
  source: /note="Description of Artificial Sequence: Synthetic oligonucleotide"
tgcagcgcaaacttcacagga

SEQ ID NO: 29601 - DNA, 21 bp, Artificial Sequence
  source: /note="Description of Artificial Sequence: Synthetic oligonucleotide"
tgcagcgaaagcctcatggca

SEQ ID NO: 29602 - DNA, 21 bp, Artificial Sequence
  source: /note="Description of Artificial Sequence: Synthetic oligonucleotide"
tgcagcgaaagcagcatcttc

SEQ ID NO: 29603 - DNA, 21 bp, Artificial Sequence
  source: /note="Description of Artificial Sequence: Synthetic oligonucleotide"
tgcagcggaacaacaaactgc

SEQ ID NO: 29604 - DNA, 21 bp, Artificial Sequence
  source: /note="Description of Artificial Sequence: Synthetic oligonucleotide"
tgcagcccaccacacttccca

SEQ ID NO: 29605 - DNA, 21 bp, Artificial Sequence
  source: /note="Description of Artificial Sequence: Synthetic oligonucleotide"
tgcagcccaagcggagtcatc

SEQ ID NO: 29606 - DNA, 21 bp, Artificial Sequence
  source: /note="Description of Artificial Sequence: Synthetic oligonucleotide"
tgcagcagcagaccattcgca

SEQ ID NO: 29607 - DNA, 21 bp, Artificial Sequence
  source: /note="Description of Artificial Sequence: Synthetic oligonucleotide"
tgcagcagcacaacaaaatgc

SEQ ID NO: 29608 - DNA, 21 bp, Artificial Sequence
  source: /note="Description of Artificial Sequence: Synthetic oligonucleotide"
tgcacagcagaactcccattc

SEQ ID NO: 29609 - DNA, 21 bp, Artificial Sequence
  source: /note="Description of Artificial Sequence: Synthetic oligonucleotide"
tgcacagaccacccagcatgc

SEQ ID NO: 29610 - DNA, 21 bp, Artificial Sequence
  source: /note="Description of Artificial Sequence: Synthetic oligonucleotide"
tgcacagacagcacatgcctc

SEQ ID NO: 29611 - DNA, 21 bp, Artificial Sequence
  source: /note="Description of Artificial Sequence: Synthetic oligonucleotide"
tgcacaggaccactctgcagc

SEQ ID NO: 29612 - DNA, 21 bp, Artificial Sequence
  source: /note="Description of Artificial Sequence: Synthetic oligonucleotide"
tgcacaaaaagcatctgcaca

SEQ ID NO: 29613 - DNA, 21 bp, Artificial Sequence
  source: /note="Description of Artificial Sequence: Synthetic oligonucleotide"
tgcacaagcacaaaaatctac

SEQ ID NO: 29614 - DNA, 21 bp, Artificial Sequence
  source: /note="Description of Artificial Sequence: Synthetic oligonucleotide"
tgcacaacagacgcactcagc

SEQ ID NO: 29615 - DNA, 21 bp, Artificial Sequence
  source: /note="Description of Artificial Sequence: Synthetic oligonucleotide"
tgcacatacacactcatcgac

SEQ ID NO: 29616 - DNA, 21 bp, Artificial Sequence
  source: /note="Description of Artificial Sequence: Synthetic oligonucleotide"
tgcgtcccagacagcagcaaa

SEQ ID NO: 29617 - DNA, 21 bp, Artificial Sequence
  source: /note="Description of Artificial Sequence: Synthetic oligonucleotide"
tgcgtcagactcacaacacca

SEQ ID NO: 29618 - DNA, 21 bp, Artificial Sequence
  source: /note="Description of Artificial Sequence: Synthetic oligonucleotide"
tgcgtcacaccagaaaaagtc

SEQ ID NO: 29619 - DNA, 21 bp, Artificial Sequence
  source: /note="Description of Artificial Sequence: Synthetic oligonucleotide"
tgcgtcgtcaaccaacaagga

SEQ ID NO: 29620 - DNA, 21 bp, Artificial Sequence
  source: /note="Description of Artificial Sequence: Synthetic oligonucleotide"
tgcgtcgtcagcagacaagac

SEQ ID NO: 29621 - DNA, 21 bp, Artificial Sequence
  source: /note="Description of Artificial Sequence: Synthetic oligonucleotide"
tgctacatcggaacacaatgc

SEQ ID NO: 29622 - DNA, 21 bp, Artificial Sequence
  source: /note="Description of Artificial Sequence: Synthetic oligonucleotide"
tgctacctcagcacatgcaca

SEQ ID NO: 29623 - DNA, 21 bp, Artificial Sequence
  source: /note="Description of Artificial Sequence: Synthetic oligonucleotide"
tgctacaacagaacagaatgc

SEQ ID NO: 29624 - DNA, 21 bp, Artificial Sequence
  source: /note="Description of Artificial Sequence: Synthetic oligonucleotide"
tgctacccaccagaaaacgca

SEQ ID NO: 29625 - DNA, 21 bp, Artificial Sequence
  source: /note="Description of Artificial Sequence: Synthetic oligonucleotide"
gacgcagcaggaacaagcaaa

SEQ ID NO: 29626 - DNA, 21 bp, Artificial Sequence
  source: /note="Description of Artificial Sequence: Synthetic oligonucleotide"
gacgcagcaaaaagcgcatac

SEQ ID NO: 29627 - DNA, 21 bp, Artificial Sequence
  source: /note="Description of Artificial Sequence: Synthetic oligonucleotide"
gacgcagcaacaaaagcaaca

SEQ ID NO: 29628 - DNA, 21 bp, Artificial Sequence
  source: /note="Description of Artificial Sequence: Synthetic oligonucleotide"
gacgcagaaagagcaaaacca

SEQ ID NO: 29629 - DNA, 21 bp, Artificial Sequence
  source: /note="Description of Artificial Sequence: Synthetic oligonucleotide"
gacgcagaatggccaatgtac

SEQ ID NO: 29630 - DNA, 21 bp, Artificial Sequence
  source: /note="Description of Artificial Sequence: Synthetic oligonucleotide"
gacgcaggaatcggaggacca

SEQ ID NO: 29631 - DNA, 21 bp, Artificial Sequence
  source: /note="Description of Artificial Sequence: Synthetic oligonucleotide"
gacgcaggaaactggcaacca

SEQ ID NO: 29632 - DNA, 21 bp, Artificial Sequence
  source: /note="Description of Artificial Sequence: Synthetic oligonucleotide"
gacgcaggaccaagagcacaa

SEQ ID NO: 29633 - DNA, 21 bp, Artificial Sequence
  source: /note="Description of Artificial Sequence: Synthetic oligonucleotide"
gacgcacacaacgcaccaaga

SEQ ID NO: 29634 - DNA, 21 bp, Artificial Sequence
  source: /note="Description of Artificial Sequence: Synthetic oligonucleotide"
gacgcacacagactcgtcaca

SEQ ID NO: 29635 - DNA, 21 bp, Artificial Sequence
  source: /note="Description of Artificial Sequence: Synthetic oligonucleotide"
gacgcaatcaaagcaatgagc

SEQ ID NO: 29636 - DNA, 21 bp, Artificial Sequence
  source: /note="Description of Artificial Sequence: Synthetic oligonucleotide"
gacgcaatcaacatgggagga

SEQ ID NO: 29637 - DNA, 21 bp, Artificial Sequence
  source: /note="Description of Artificial Sequence: Synthetic oligonucleotide"
gacgcaatcccactcgcaagc

SEQ ID NO: 29638 - DNA, 21 bp, Artificial Sequence
  source: /note="Description of Artificial Sequence: Synthetic oligonucleotide"
gacgcaaaagtcatggtccca

SEQ ID NO: 29639 - DNA, 21 bp, Artificial Sequence
  source: /note="Description of Artificial Sequence: Synthetic oligonucleotide"
gacgcactcaaaggagcaaaa

SEQ ID NO: 29640 - DNA, 21 bp, Artificial Sequence
  source: /note="Description of Artificial Sequence: Synthetic oligonucleotide"
gacgcaccaaacagcgtcatg

SEQ ID NO: 29641 - DNA, 21 bp, Artificial Sequence
  source: /note="Description of Artificial Sequence: Synthetic oligonucleotide"
gacgcaccaccactcagaaca

SEQ ID NO: 29642 - DNA, 21 bp, Artificial Sequence
  source: /note="Description of Artificial Sequence: Synthetic oligonucleotide"
gacgcaccaagagaaagcctc

SEQ ID NO: 29643 - DNA, 21 bp, Artificial Sequence
  source: /note="Description of Artificial Sequence: Synthetic oligonucleotide"
gacgcaccaagaaacgcagaa

SEQ ID NO: 29644 - DNA, 21 bp, Artificial Sequence
  source: /note="Description of Artificial Sequence: Synthetic oligonucleotide"
gacgcacaaccaagccaaatg

SEQ ID NO: 29645 - DNA, 21 bp, Artificial Sequence
  source: /note="Description of Artificial Sequence: Synthetic oligonucleotide"
gacgcacaatacagccaaaga

SEQ ID NO: 29646 - DNA, 21 bp, Artificial Sequence
  source: /note="Description of Artificial Sequence: Synthetic oligonucleotide"
gacgcaagagcacacccactc

SEQ ID NO: 29647 - DNA, 21 bp, Artificial Sequence
  source: /note="Description of Artificial Sequence: Synthetic oligonucleotide"
gacgcaagattcagcatgcaa

SEQ ID NO: 29648 - DNA, 21 bp, Artificial Sequence
  source: /note="Description of Artificial Sequence: Synthetic oligonucleotide"
gacgcaagactcgcaccagaa

SEQ ID NO: 29649 - DNA, 21 bp, Artificial Sequence
  source: /note="Description of Artificial Sequence: Synthetic oligonucleotide"
gacgcaagaatgctcatcagc

SEQ ID NO: 29650 - DNA, 21 bp, Artificial Sequence
  source: /note="Description of Artificial Sequence: Synthetic oligonucleotide"
gacgcaagaagagacatcgtc

SEQ ID NO: 29651 - DNA, 21 bp, Artificial Sequence
  source: /note="Description of Artificial Sequence: Synthetic oligonucleotide"
gacgcaagaacagcaacattc

SEQ ID NO: 29652 - DNA, 21 bp, Artificial Sequence
  source: /note="Description of Artificial Sequence: Synthetic oligonucleotide"
gacgcaagagtcacaagattc

SEQ ID NO: 29653 - DNA, 21 bp, Artificial Sequence
  source: /note="Description of Artificial Sequence: Synthetic oligonucleotide"
gacgcaagcctcatgaaaatg

SEQ ID NO: 29654 - DNA, 21 bp, Artificial Sequence
  source: /note="Description of Artificial Sequence: Synthetic oligonucleotide"
gacgcaagcccaaacagagaa

SEQ ID NO: 29655 - DNA, 21 bp, Artificial Sequence
  source: /note="Description of Artificial Sequence: Synthetic oligonucleotide"
gacgcaagcacaatcaaagac

SEQ ID NO: 29656 - DNA, 21 bp, Artificial Sequence
  source: /note="Description of Artificial Sequence: Synthetic oligonucleotide"
gacgcagtcgcagacgaccca

SEQ ID NO: 29657 - DNA, 21 bp, Artificial Sequence
  source: /note="Description of Artificial Sequence: Synthetic oligonucleotide"
gacgcagtcgaaagagtcagc

SEQ ID NO: 29658 - DNA, 21 bp, Artificial Sequence
  source: /note="Description of Artificial Sequence: Synthetic oligonucleotide"
gacgcagtcgtcgaaagaagc

SEQ ID NO: 29659 - DNA, 21 bp, Artificial Sequence
  source: /note="Description of Artificial Sequence: Synthetic oligonucleotide"
gactgcgacacacaaaaaaca

SEQ ID NO: 29660 - DNA, 21 bp, Artificial Sequence
  source: /note="Description of Artificial Sequence: Synthetic oligonucleotide"
gactgcctcctcagcggacca

SEQ ID NO: 29661 - DNA, 21 bp, Artificial Sequence
  source: /note="Description of Artificial Sequence: Synthetic oligonucleotide"
gactgcccattccaaaaagga

SEQ ID NO: 29662 - DNA, 21 bp, Artificial Sequence
  source: /note="Description of Artificial Sequence: Synthetic oligonucleotide"
gactgcagcttcaaatgcagc

SEQ ID NO: 29663 - DNA, 21 bp, Artificial Sequence
  source: /note="Description of Artificial Sequence: Synthetic oligonucleotide"
gacgacgaacacagaagcaca

SEQ ID NO: 29664 - DNA, 21 bp, Artificial Sequence
  source: /note="Description of Artificial Sequence: Synthetic oligonucleotide"
gacgacggacacccacacctc

SEQ ID NO: 29665 - DNA, 21 bp, Artificial Sequence
  source: /note="Description of Artificial Sequence: Synthetic oligonucleotide"
gacgacatcgcatgcgacgca

SEQ ID NO: 29666 - DNA, 21 bp, Artificial Sequence
  source: /note="Description of Artificial Sequence: Synthetic oligonucleotide"
gacgacaaagaaagaagagaa

SEQ ID NO: 29667 - DNA, 21 bp, Artificial Sequence
  source: /note="Description of Artificial Sequence: Synthetic oligonucleotide"
gacgacatggcaagaggaaga

SEQ ID NO: 29668 - DNA, 21 bp, Artificial Sequence
  source: /note="Description of Artificial Sequence: Synthetic oligonucleotide"
gacgacccacacagcagcagc

SEQ ID NO: 29669 - DNA, 21 bp, Artificial Sequence
  source: /note="Description of Artificial Sequence: Synthetic oligonucleotide"
gacgacccaagagacggaaga

SEQ ID NO: 29670 - DNA, 21 bp, Artificial Sequence
  source: /note="Description of Artificial Sequence: Synthetic oligonucleotide"
gacgacagaagacacttcgtc

SEQ ID NO: 29671 - DNA, 21 bp, Artificial Sequence
  source: /note="Description of Artificial Sequence: Synthetic oligonucleotide"
gacgacagaagcttcccaatg

SEQ ID NO: 29672 - DNA, 21 bp, Artificial Sequence
  source: /note="Description of Artificial Sequence: Synthetic oligonucleotide"
gacgacagcctctgccaactc

SEQ ID NO: 29673 - DNA, 21 bp, Artificial Sequence
  source: /note="Description of Artificial Sequence: Synthetic oligonucleotide"
gacgacacaagattcgacgac

SEQ ID NO: 29674 - DNA, 21 bp, Artificial Sequence
  source: /note="Description of Artificial Sequence: Synthetic oligonucleotide"
gacgactggccaaaagtcagc

SEQ ID NO: 29675 - DNA, 21 bp, Artificial Sequence
  source: /note="Description of Artificial Sequence: Synthetic oligonucleotide"
gacgactaccacgcaccagca

SEQ ID NO: 29676 - DNA, 21 bp, Artificial Sequence
  source: /note="Description of Artificial Sequence: Synthetic oligonucleotide"
gacgaagcaaaaaaacaccac

SEQ ID NO: 29677 - DNA, 21 bp, Artificial Sequence
  source: /note="Description of Artificial Sequence: Synthetic oligonucleotide"
gacgaagcaccacacccagca

SEQ ID NO: 29678 - DNA, 21 bp, Artificial Sequence
  source: /note="Description of Artificial Sequence: Synthetic oligonucleotide"
gacgaagacatcaaaagactc

SEQ ID NO: 29679 - DNA, 21 bp, Artificial Sequence
  source: /note="Description of Artificial Sequence: Synthetic oligonucleotide"
gacgaaggaaaagtcaaaaga

SEQ ID NO: 29680 - DNA, 21 bp, Artificial Sequence
  source: /note="Description of Artificial Sequence: Synthetic oligonucleotide"
gacgaaggaagacaccaaaga

SEQ ID NO: 29681 - DNA, 21 bp, Artificial Sequence
  source: /note="Description of Artificial Sequence: Synthetic oligonucleotide"
gacgaaaacgaaacaggacca

SEQ ID NO: 29682 - DNA, 21 bp, Artificial Sequence
  source: /note="Description of Artificial Sequence: Synthetic oligonucleotide"
gacgaaaacgtcgcactccca

SEQ ID NO: 29683 - DNA, 21 bp, Artificial Sequence
  source: /note="Description of Artificial Sequence: Synthetic oligonucleotide"
gacgaaccattcaaaaaagca

SEQ ID NO: 29684 - DNA, 21 bp, Artificial Sequence
  source: /note="Description of Artificial Sequence: Synthetic oligonucleotide"
gacgaaccaggaatgacaagc

SEQ ID NO: 29685 - DNA, 21 bp, Artificial Sequence
  source: /note="Description of Artificial Sequence: Synthetic oligonucleotide"
gacgaaccaagacaccaaatg

SEQ ID NO: 29686 - DNA, 21 bp, Artificial Sequence
  source: /note="Description of Artificial Sequence: Synthetic oligonucleotide"
gacgaaagaggattcagaagc

SEQ ID NO: 29687 - DNA, 21 bp, Artificial Sequence
  source: /note="Description of Artificial Sequence: Synthetic oligonucleotide"
gacgaaagaagactcgaccca

SEQ ID NO: 29688 - DNA, 21 bp, Artificial Sequence
  source: /note="Description of Artificial Sequence: Synthetic oligonucleotide"
gacgaaagcacaatgagcaga

SEQ ID NO: 29689 - DNA, 21 bp, Artificial Sequence
  source: /note="Description of Artificial Sequence: Synthetic oligonucleotide"
gacgaaagctacgacagaaac

SEQ ID NO: 29690 - DNA, 21 bp, Artificial Sequence
  source: /note="Description of Artificial Sequence: Synthetic oligonucleotide"
gacgaagtcaaaaaagaagga

SEQ ID NO: 29691 - DNA, 21 bp, Artificial Sequence
  source: /note="Description of Artificial Sequence: Synthetic oligonucleotide"
gacgaatgggcacacgcaaga

SEQ ID NO: 29692 - DNA, 21 bp, Artificial Sequence
  source: /note="Description of Artificial Sequence: Synthetic oligonucleotide"
gacttcgcaggaaacagcgac

SEQ ID NO: 29693 - DNA, 21 bp, Artificial Sequence
  source: /note="Description of Artificial Sequence: Synthetic oligonucleotide"
gacttcgcactcgcaagccca

SEQ ID NO: 29694 - DNA, 21 bp, Artificial Sequence
  source: /note="Description of Artificial Sequence: Synthetic oligonucleotide"
gacttcgcaagacaacacgac

SEQ ID NO: 29695 - DNA, 21 bp, Artificial Sequence
  source: /note="Description of Artificial Sequence: Synthetic oligonucleotide"
gacttcgaatgcatcggagtc

SEQ ID NO: 29696 - DNA, 21 bp, Artificial Sequence
  source: /note="Description of Artificial Sequence: Synthetic oligonucleotide"
gacttcgaaaacccaatggaa

SEQ ID NO: 29697 - DNA, 21 bp, Artificial Sequence
  source: /note="Description of Artificial Sequence: Synthetic oligonucleotide"
gacttcggaggactcgcagtc

SEQ ID NO: 29698 - DNA, 21 bp, Artificial Sequence
  source: /note="Description of Artificial Sequence: Synthetic oligonucleotide"
gacttcaaagcagtctgctgc

SEQ ID NO: 29699 - DNA, 21 bp, Artificial Sequence
  source: /note="Description of Artificial Sequence: Synthetic oligonucleotide"
gacttcaaagtcgtcagcgga

SEQ ID NO: 29700 - DNA, 21 bp, Artificial Sequence
  source: /note="Description of Artificial Sequence: Synthetic oligonucleotide"
gacttcccactcaaaccagga

SEQ ID NO: 29701 - DNA, 21 bp, Artificial Sequence
  source: /note="Description of Artificial Sequence: Synthetic oligonucleotide"
gacttcagaaaaccagaacaa

SEQ ID NO: 29702 - DNA, 21 bp, Artificial Sequence
  source: /note="Description of Artificial Sequence: Synthetic oligonucleotide"
gacttcagcctcggactcctc

SEQ ID NO: 29703 - DNA, 21 bp, Artificial Sequence
  source: /note="Description of Artificial Sequence: Synthetic oligonucleotide"
gacttcagcctcaacaacagc

SEQ ID NO: 29704 - DNA, 21 bp, Artificial Sequence
  source: /note="Description of Artificial Sequence: Synthetic oligonucleotide"
gacttcagcctccaagacgca

SEQ ID NO: 29705 - DNA, 21 bp, Artificial Sequence
  source: /note="Description of Artificial Sequence: Synthetic oligonucleotide"
gacttcagcagaagagcagac

SEQ ID NO: 29706 - DNA, 21 bp, Artificial Sequence
  source: /note="Description of Artificial Sequence: Synthetic oligonucleotide"
gacttcacaagagcagacgga

SEQ ID NO: 29707 - DNA, 21 bp, Artificial Sequence
  source: /note="Description of Artificial Sequence: Synthetic oligonucleotide"
gacttcacagtcccagcagga

SEQ ID NO: 29708 - DNA, 21 bp, Artificial Sequence
  source: /note="Description of Artificial Sequence: Synthetic oligonucleotide"
gacttcgtcccactcaaaagc

SEQ ID NO: 29709 - DNA, 21 bp, Artificial Sequence
  source: /note="Description of Artificial Sequence: Synthetic oligonucleotide"
gacttcgtcacaatcccaaac

SEQ ID NO: 29710 - DNA, 21 bp, Artificial Sequence
  source: /note="Description of Artificial Sequence: Synthetic oligonucleotide"
gacggagcaagcggagtccca

SEQ ID NO: 29711 - DNA, 21 bp, Artificial Sequence
  source: /note="Description of Artificial Sequence: Synthetic oligonucleotide"
gacggaggacacagcgtcaga

SEQ ID NO: 29712 - DNA, 21 bp, Artificial Sequence
  source: /note="Description of Artificial Sequence: Synthetic oligonucleotide"
gacggaatcagagacccaaga

SEQ ID NO: 29713 - DNA, 21 bp, Artificial Sequence
  source: /note="Description of Artificial Sequence: Synthetic oligonucleotide"
gacggaaaagcaaaagtcagc

SEQ ID NO: 29714 - DNA, 21 bp, Artificial Sequence
  source: /note="Description of Artificial Sequence: Synthetic oligonucleotide"
gacggaaaacacacagactac

SEQ ID NO: 29715 - DNA, 21 bp, Artificial Sequence
  source: /note="Description of Artificial Sequence: Synthetic oligonucleotide"
gacggactcagaacagaaagc

SEQ ID NO: 29716 - DNA, 21 bp, Artificial Sequence
  source: /note="Description of Artificial Sequence: Synthetic oligonucleotide"
gacggactcagcagactccca

SEQ ID NO: 29717 - DNA, 21 bp, Artificial Sequence
  source: /note="Description of Artificial Sequence: Synthetic oligonucleotide"
gacggaatgctcagagacaga

SEQ ID NO: 29718 - DNA, 21 bp, Artificial Sequence
  source: /note="Description of Artificial Sequence: Synthetic oligonucleotide"
gacggaaacagctaccaccca

SEQ ID NO: 29719 - DNA, 21 bp, Artificial Sequence
  source: /note="Description of Artificial Sequence: Synthetic oligonucleotide"
gacggaaacacagcaagagga

SEQ ID NO: 29720 - DNA, 21 bp, Artificial Sequence
  source: /note="Description of Artificial Sequence: Synthetic oligonucleotide"
gacggaccagaagaagaaaga

SEQ ID NO: 29721 - DNA, 21 bp, Artificial Sequence
  source: /note="Description of Artificial Sequence: Synthetic oligonucleotide"
gacggaccaggaagcccaaac

SEQ ID NO: 29722 - DNA, 21 bp, Artificial Sequence
  source: /note="Description of Artificial Sequence: Synthetic oligonucleotide"
gacggaagacacctcagccca

SEQ ID NO: 29723 - DNA, 21 bp, Artificial Sequence
  source: /note="Description of Artificial Sequence: Synthetic oligonucleotide"
gacggaagaacagtcgcagca

SEQ ID NO: 29724 - DNA, 21 bp, Artificial Sequence
  source: /note="Description of Artificial Sequence: Synthetic oligonucleotide"
gacggaagcttcgaaccatac

SEQ ID NO: 29725 - DNA, 21 bp, Artificial Sequence
  source: /note="Description of Artificial Sequence: Synthetic oligonucleotide"
gacggaagcggaacactcaac

SEQ ID NO: 29726 - DNA, 21 bp, Artificial Sequence
  source: /note="Description of Artificial Sequence: Synthetic oligonucleotide"
gacggaagcccaagctgggca

SEQ ID NO: 29727 - DNA, 21 bp, Artificial Sequence
  source: /note="Description of Artificial Sequence: Synthetic oligonucleotide"
gacggaacagaccaaagccaa

SEQ ID NO: 29728 - DNA, 21 bp, Artificial Sequence
  source: /note="Description of Artificial Sequence: Synthetic oligonucleotide"
gacggaacaagagcacaatgg

SEQ ID NO: 29729 - DNA, 21 bp, Artificial Sequence
  source: /note="Description of Artificial Sequence: Synthetic oligonucleotide"
gacggaacaagcctcaaacac

SEQ ID NO: 29730 - DNA, 21 bp, Artificial Sequence
  source: /note="Description of Artificial Sequence: Synthetic oligonucleotide"
gacggaacatacagaaacatg

SEQ ID NO: 29731 - DNA, 21 bp, Artificial Sequence
  source: /note="Description of Artificial Sequence: Synthetic oligonucleotide"
gacggagtcacaacactcagc

SEQ ID NO: 29732 - DNA, 21 bp, Artificial Sequence
  source: /note="Description of Artificial Sequence: Synthetic oligonucleotide"
gaccacgcacacagaagcaca

SEQ ID NO: 29733 - DNA, 21 bp, Artificial Sequence
  source: /note="Description of Artificial Sequence: Synthetic oligonucleotide"
gaccacaaaagcaacagcaga

SEQ ID NO: 29734 - DNA, 21 bp, Artificial Sequence
  source: /note="Description of Artificial Sequence: Synthetic oligonucleotide"
gaccacctcgcacaagaatgc

SEQ ID NO: 29735 - DNA, 21 bp, Artificial Sequence
  source: /note="Description of Artificial Sequence: Synthetic oligonucleotide"
gaccacctcgacgtcaacgca

SEQ ID NO: 29736 - DNA, 21 bp, Artificial Sequence
  source: /note="Description of Artificial Sequence: Synthetic oligonucleotide"
gaccacaaccacatgggaagc

SEQ ID NO: 29737 - DNA, 21 bp, Artificial Sequence
  source: /note="Description of Artificial Sequence: Synthetic oligonucleotide"
gaccacaacctcagacaaaac

SEQ ID NO: 29738 - DNA, 21 bp, Artificial Sequence
  source: /note="Description of Artificial Sequence: Synthetic oligonucleotide"
gaccacccatacctcagccca

SEQ ID NO: 29739 - DNA, 21 bp, Artificial Sequence
  source: /note="Description of Artificial Sequence: Synthetic oligonucleotide"
gaccacagaacactcgaaagc

SEQ ID NO: 29740 - DNA, 21 bp, Artificial Sequence
  source: /note="Description of Artificial Sequence: Synthetic oligonucleotide"
gaccacagcgcactcagcagc

SEQ ID NO: 29741 - DNA, 21 bp, Artificial Sequence
  source: /note="Description of Artificial Sequence: Synthetic oligonucleotide"
gaccacagcggaaaaaaagac

SEQ ID NO: 29742 - DNA, 21 bp, Artificial Sequence
  source: /note="Description of Artificial Sequence: Synthetic oligonucleotide"
gaccacagcatggcactcaga

SEQ ID NO: 29743 - DNA, 21 bp, Artificial Sequence
  source: /note="Description of Artificial Sequence: Synthetic oligonucleotide"
gaccacagcgtcccaggaaca

SEQ ID NO: 29744 - DNA, 21 bp, Artificial Sequence
  source: /note="Description of Artificial Sequence: Synthetic oligonucleotide"
gaccacacagacagagacgga

SEQ ID NO: 29745 - DNA, 21 bp, Artificial Sequence
  source: /note="Description of Artificial Sequence: Synthetic oligonucleotide"
gaccacacaccactcctcagc

SEQ ID NO: 29746 - DNA, 21 bp, Artificial Sequence
  source: /note="Description of Artificial Sequence: Synthetic oligonucleotide"
gaccactggaacggagacagc

SEQ ID NO: 29747 - DNA, 21 bp, Artificial Sequence
  source: /note="Description of Artificial Sequence: Synthetic oligonucleotide"
gaccactacgcaagactccca

SEQ ID NO: 29748 - DNA, 21 bp, Artificial Sequence
  source: /note="Description of Artificial Sequence: Synthetic oligonucleotide"
gacatcgcacacccaagaaac

SEQ ID NO: 29749 - DNA, 21 bp, Artificial Sequence
  source: /note="Description of Artificial Sequence: Synthetic oligonucleotide"
gacatcgcacaacacgaaaca

SEQ ID NO: 29750 - DNA, 21 bp, Artificial Sequence
  source: /note="Description of Artificial Sequence: Synthetic oligonucleotide"
gacatcgaagacacaccagtc

SEQ ID NO: 29751 - DNA, 21 bp, Artificial Sequence
  source: /note="Description of Artificial Sequence: Synthetic oligonucleotide"
gacatccacagaagcagctac

SEQ ID NO: 29752 - DNA, 21 bp, Artificial Sequence
  source: /note="Description of Artificial Sequence: Synthetic oligonucleotide"
gacatccacagccacctctac

SEQ ID NO: 29753 - DNA, 21 bp, Artificial Sequence
  source: /note="Description of Artificial Sequence: Synthetic oligonucleotide"
gacatcaacttcaaagcacca

SEQ ID NO: 29754 - DNA, 21 bp, Artificial Sequence
  source: /note="Description of Artificial Sequence: Synthetic oligonucleotide"
gacatcaacccaacaacactc

SEQ ID NO: 29755 - DNA, 21 bp, Artificial Sequence
  source: /note="Description of Artificial Sequence: Synthetic oligonucleotide"
gacatcccagtcgcaagcaaa

SEQ ID NO: 29756 - DNA, 21 bp, Artificial Sequence
  source: /note="Description of Artificial Sequence: Synthetic oligonucleotide"
gacatcccagtcacaagcgca

SEQ ID NO: 29757 - DNA, 21 bp, Artificial Sequence
  source: /note="Description of Artificial Sequence: Synthetic oligonucleotide"
gacatcagacacagactcagc

SEQ ID NO: 29758 - DNA, 21 bp, Artificial Sequence
  source: /note="Description of Artificial Sequence: Synthetic oligonucleotide"
gacatcagaagaccaacacca

SEQ ID NO: 29759 - DNA, 21 bp, Artificial Sequence
  source: /note="Description of Artificial Sequence: Synthetic oligonucleotide"
gacatcagaacaggaagcgtc

SEQ ID NO: 29760 - DNA, 21 bp, Artificial Sequence
  source: /note="Description of Artificial Sequence: Synthetic oligonucleotide"
gacatcagcctcccagaagca

SEQ ID NO: 29761 - DNA, 21 bp, Artificial Sequence
  source: /note="Description of Artificial Sequence: Synthetic oligonucleotide"
gacatcagcaacgaccaatac

SEQ ID NO: 29762 - DNA, 21 bp, Artificial Sequence
  source: /note="Description of Artificial Sequence: Synthetic oligonucleotide"
gacatcagcagaccagtcaga

SEQ ID NO: 29763 - DNA, 21 bp, Artificial Sequence
  source: /note="Description of Artificial Sequence: Synthetic oligonucleotide"
gacatcagcagacaaaacagc

SEQ ID NO: 29764 - DNA, 21 bp, Artificial Sequence
  source: /note="Description of Artificial Sequence: Synthetic oligonucleotide"
gacatcacagcaacaacagca

SEQ ID NO: 29765 - DNA, 21 bp, Artificial Sequence
  source: /note="Description of Artificial Sequence: Synthetic oligonucleotide"
gacatcacaggaagagtccca

SEQ ID NO: 29766 - DNA, 21 bp, Artificial Sequence
  source: /note="Description of Artificial Sequence: Synthetic oligonucleotide"
gacaaagcagtcggaatgatc

SEQ ID NO: 29767 - DNA, 21 bp, Artificial Sequence
  source: /note="Description of Artificial Sequence: Synthetic oligonucleotide"
gacaaagacgaactcatgatg

SEQ ID NO: 29768 - DNA, 21 bp, Artificial Sequence
  source: /note="Description of Artificial Sequence: Synthetic oligonucleotide"
gacaaagaagtcccaccaatg

SEQ ID NO: 29769 - DNA, 21 bp, Artificial Sequence
  source: /note="Description of Artificial Sequence: Synthetic oligonucleotide"
gacaaagaatacgcaggactc

SEQ ID NO: 29770 - DNA, 21 bp, Artificial Sequence
  source: /note="Description of Artificial Sequence: Synthetic oligonucleotide"
gacaaaggaaaagcaagccca

SEQ ID NO: 29771 - DNA, 21 bp, Artificial Sequence
  source: /note="Description of Artificial Sequence: Synthetic oligonucleotide"
gacaaaggaagcctcacaatg

SEQ ID NO: 29772 - DNA, 21 bp, Artificial Sequence
  source: /note="Description of Artificial Sequence: Synthetic oligonucleotide"
gacaaaatcccaaacttcagc

SEQ ID NO: 29773 - DNA, 21 bp, Artificial Sequence
  source: /note="Description of Artificial Sequence: Synthetic oligonucleotide"
gacaaactccacggacaagca

SEQ ID NO: 29774 - DNA, 21 bp, Artificial Sequence
  source: /note="Description of Artificial Sequence: Synthetic oligonucleotide"
gacaaactcccaggagacaga

SEQ ID NO: 29775 - DNA, 21 bp, Artificial Sequence
  source: /note="Description of Artificial Sequence: Synthetic oligonucleotide"
gacaaactcagagcaaacaac

SEQ ID NO: 29776 - DNA, 21 bp, Artificial Sequence
  source: /note="Description of Artificial Sequence: Synthetic oligonucleotide"
gacaaactcacaccaagactc

SEQ ID NO: 29777 - DNA, 21 bp, Artificial Sequence
  source: /note="Description of Artificial Sequence: Synthetic oligonucleotide"
gacaaaatgaacatgccacca

SEQ ID NO: 29778 - DNA, 21 bp, Artificial Sequence
  source: /note="Description of Artificial Sequence: Synthetic oligonucleotide"
gacaaaagagacggaagactc

SEQ ID NO: 29779 - DNA, 21 bp, Artificial Sequence
  source: /note="Description of Artificial Sequence: Synthetic oligonucleotide"
gacaaaagaagcggaacatgc

SEQ ID NO: 29780 - DNA, 21 bp, Artificial Sequence
  source: /note="Description of Artificial Sequence: Synthetic oligonucleotide"
gacaaaagcatcgcaacaaac

SEQ ID NO: 29781 - DNA, 21 bp, Artificial Sequence
  source: /note="Description of Artificial Sequence: Synthetic oligonucleotide"
gacaaaagcccaatgatgaga

SEQ ID NO: 29782 - DNA, 21 bp, Artificial Sequence
  source: /note="Description of Artificial Sequence: Synthetic oligonucleotide"
gacaaaagcagactctacgca

SEQ ID NO: 29783 - DNA, 21 bp, Artificial Sequence
  source: /note="Description of Artificial Sequence: Synthetic oligonucleotide"
gacaaaagcagaaaccaaatg

SEQ ID NO: 29784 - DNA, 21 bp, Artificial Sequence
  source: /note="Description of Artificial Sequence: Synthetic oligonucleotide"
gacaaaacagcagtcatcagc

SEQ ID NO: 29785 - DNA, 21 bp, Artificial Sequence
  source: /note="Description of Artificial Sequence: Synthetic oligonucleotide"
gacctcgcactcagcagagga

SEQ ID NO: 29786 - DNA, 21 bp, Artificial Sequence
  source: /note="Description of Artificial Sequence: Synthetic oligonucleotide"
gacctcgcaagcgtcccaaga

SEQ ID NO: 29787 - DNA, 21 bp, Artificial Sequence
  source: /note="Description of Artificial Sequence: Synthetic oligonucleotide"
gacctcgacccaatctgcaca

SEQ ID NO: 29788 - DNA, 21 bp, Artificial Sequence
  source: /note="Description of Artificial Sequence: Synthetic oligonucleotide"
gacctcgacagcccacacagc

SEQ ID NO: 29789 - DNA, 21 bp, Artificial Sequence
  source: /note="Description of Artificial Sequence: Synthetic oligonucleotide"
gacctcgaacaccaatgccca

SEQ ID NO: 29790 - DNA, 21 bp, Artificial Sequence
  source: /note="Description of Artificial Sequence: Synthetic oligonucleotide"
gacctcttcaaaatcgaaaga

SEQ ID NO: 29791 - DNA, 21 bp, Artificial Sequence
  source: /note="Description of Artificial Sequence: Synthetic oligonucleotide"
gacctcggaggactcgtccac

SEQ ID NO: 29792 - DNA, 21 bp, Artificial Sequence
  source: /note="Description of Artificial Sequence: Synthetic oligonucleotide"
gacctcggaccagacaaagga

SEQ ID NO: 29793 - DNA, 21 bp, Artificial Sequence
  source: /note="Description of Artificial Sequence: Synthetic oligonucleotide"
gacctccacggagcaatgaga

SEQ ID NO: 29794 - DNA, 21 bp, Artificial Sequence
  source: /note="Description of Artificial Sequence: Synthetic oligonucleotide"
gacctccacatccaagaccca

SEQ ID NO: 29795 - DNA, 21 bp, Artificial Sequence
  source: /note="Description of Artificial Sequence: Synthetic oligonucleotide"
gacctcatcgaaaacagagaa

SEQ ID NO: 29796 - DNA, 21 bp, Artificial Sequence
  source: /note="Description of Artificial Sequence: Synthetic oligonucleotide"
gacctcatcgaaagaggaagc

SEQ ID NO: 29797 - DNA, 21 bp, Artificial Sequence
  source: /note="Description of Artificial Sequence: Synthetic oligonucleotide"
gacctcatcccaagcagacca

SEQ ID NO: 29798 - DNA, 21 bp, Artificial Sequence
  source: /note="Description of Artificial Sequence: Synthetic oligonucleotide"
gacctcatcgtcagaggactc

SEQ ID NO: 29799 - DNA, 21 bp, Artificial Sequence
  source: /note="Description of Artificial Sequence: Synthetic oligonucleotide"
gacctcaaaggaggaggattc

SEQ ID NO: 29800 - DNA, 21 bp, Artificial Sequence
  source: /note="Description of Artificial Sequence: Synthetic oligonucleotide"
gacctcaaaaaaccagacttc

SEQ ID NO: 29801 - DNA, 21 bp, Artificial Sequence
  source: /note="Description of Artificial Sequence: Synthetic oligonucleotide"
gacctcaaactccacggacca

SEQ ID NO: 29802 - DNA, 21 bp, Artificial Sequence
  source: /note="Description of Artificial Sequence: Synthetic oligonucleotide"
gacctcaaaccaagcctcctc

SEQ ID NO: 29803 - DNA, 21 bp, Artificial Sequence
  source: /note="Description of Artificial Sequence: Synthetic oligonucleotide"
gacctcaaaagcagcgaaaga

SEQ ID NO: 29804 - DNA, 21 bp, Artificial Sequence
  source: /note="Description of Artificial Sequence: Synthetic oligonucleotide"
gacctcctcgaaagaccaagc

SEQ ID NO: 29805 - DNA, 21 bp, Artificial Sequence
  source: /note="Description of Artificial Sequence: Synthetic oligonucleotide"
gacctcctcgaaacaagactc

SEQ ID NO: 29806 - DNA, 21 bp, Artificial Sequence
  source: /note="Description of Artificial Sequence: Synthetic oligonucleotide"
gacctcctcacagcactcgca

SEQ ID NO: 29807 - DNA, 21 bp, Artificial Sequence
  source: /note="Description of Artificial Sequence: Synthetic oligonucleotide"
gacctcatgcacacagacgca

SEQ ID NO: 29808 - DNA, 21 bp, Artificial Sequence
  source: /note="Description of Artificial Sequence: Synthetic oligonucleotide"
gacctcatgcacgtcagcgga

SEQ ID NO: 29809 - DNA, 21 bp, Artificial Sequence
  source: /note="Description of Artificial Sequence: Synthetic oligonucleotide"
gacctcatgatccacggactc

SEQ ID NO: 29810 - DNA, 21 bp, Artificial Sequence
  source: /note="Description of Artificial Sequence: Synthetic oligonucleotide"
gacctcaacagaggaccaaga

SEQ ID NO: 29811 - DNA, 21 bp, Artificial Sequence
  source: /note="Description of Artificial Sequence: Synthetic oligonucleotide"
gacctcaacagaatcgaatgc

SEQ ID NO: 29812 - DNA, 21 bp, Artificial Sequence
  source: /note="Description of Artificial Sequence: Synthetic oligonucleotide"
gacctcaacacaacacaacac

SEQ ID NO: 29813 - DNA, 21 bp, Artificial Sequence
  source: /note="Description of Artificial Sequence: Synthetic oligonucleotide"
gacctcccagcagtcagccac

SEQ ID NO: 29814 - DNA, 21 bp, Artificial Sequence
  source: /note="Description of Artificial Sequence: Synthetic oligonucleotide"
gacctcccactcggaaacagc

SEQ ID NO: 29815 - DNA, 21 bp, Artificial Sequence
  source: /note="Description of Artificial Sequence: Synthetic oligonucleotide"
gacctcccactcagaacaaca

SEQ ID NO: 29816 - DNA, 21 bp, Artificial Sequence
  source: /note="Description of Artificial Sequence: Synthetic oligonucleotide"
gacctcccactcacaagcctc

SEQ ID NO: 29817 - DNA, 21 bp, Artificial Sequence
  source: /note="Description of Artificial Sequence: Synthetic oligonucleotide"
gacctcccaagacaaagcgtc

SEQ ID NO: 29818 - DNA, 21 bp, Artificial Sequence
  source: /note="Description of Artificial Sequence: Synthetic oligonucleotide"
gacctcccatacagccaccca

SEQ ID NO: 29819 - DNA, 21 bp, Artificial Sequence
  source: /note="Description of Artificial Sequence: Synthetic oligonucleotide"
gacctccaaacaggaccacaa

SEQ ID NO: 29820 - DNA, 21 bp, Artificial Sequence
  source: /note="Description of Artificial Sequence: Synthetic oligonucleotide"
gacctcagatgcgcagaagga

SEQ ID NO: 29821 - DNA, 21 bp, Artificial Sequence
  source: /note="Description of Artificial Sequence: Synthetic oligonucleotide"
gacctcagagaagcaccaaga

SEQ ID NO: 29822 - DNA, 21 bp, Artificial Sequence
  source: /note="Description of Artificial Sequence: Synthetic oligonucleotide"
gacctcagacacgcaagcagc

SEQ ID NO: 29823 - DNA, 21 bp, Artificial Sequence
  source: /note="Description of Artificial Sequence: Synthetic oligonucleotide"
gacctcagacacccaccaagc

SEQ ID NO: 29824 - DNA, 21 bp, Artificial Sequence
  source: /note="Description of Artificial Sequence: Synthetic oligonucleotide"
gacctcagaccaggaggactc

SEQ ID NO: 29825 - DNA, 21 bp, Artificial Sequence
  source: /note="Description of Artificial Sequence: Synthetic oligonucleotide"
gacctcagaagaagcatgctc

SEQ ID NO: 29826 - DNA, 21 bp, Artificial Sequence
  source: /note="Description of Artificial Sequence: Synthetic oligonucleotide"
gacctcagaagaacaccattc

SEQ ID NO: 29827 - DNA, 21 bp, Artificial Sequence
  source: /note="Description of Artificial Sequence: Synthetic oligonucleotide"
gacctcagcgcactcagagga

SEQ ID NO: 29828 - DNA, 21 bp, Artificial Sequence
  source: /note="Description of Artificial Sequence: Synthetic oligonucleotide"
gacctcagcggactcacaaga

SEQ ID NO: 29829 - DNA, 21 bp, Artificial Sequence
  source: /note="Description of Artificial Sequence: Synthetic oligonucleotide"
gacctcacacacgtcggaagc

SEQ ID NO: 29830 - DNA, 21 bp, Artificial Sequence
  source: /note="Description of Artificial Sequence: Synthetic oligonucleotide"
gacctcacaagatggccaagc

SEQ ID NO: 29831 - DNA, 21 bp, Artificial Sequence
  source: /note="Description of Artificial Sequence: Synthetic oligonucleotide"
gacctcacaacagcaccaaca

SEQ ID NO: 29832 - DNA, 21 bp, Artificial Sequence
  source: /note="Description of Artificial Sequence: Synthetic oligonucleotide"
gacctcacagtcagctacgca

SEQ ID NO: 29833 - DNA, 21 bp, Artificial Sequence
  source: /note="Description of Artificial Sequence: Synthetic oligonucleotide"
gacctcgtcgaaacagcaagc

SEQ ID NO: 29834 - DNA, 21 bp, Artificial Sequence
  source: /note="Description of Artificial Sequence: Synthetic oligonucleotide"
gacctcgtcatcccaacaaga

SEQ ID NO: 29835 - DNA, 21 bp, Artificial Sequence
  source: /note="Description of Artificial Sequence: Synthetic oligonucleotide"
gacatggacatgcaaatggca

SEQ ID NO: 29836 - DNA, 21 bp, Artificial Sequence
  source: /note="Description of Artificial Sequence: Synthetic oligonucleotide"
gacatgggagcaagacaatac

SEQ ID NO: 29837 - DNA, 21 bp, Artificial Sequence
  source: /note="Description of Artificial Sequence: Synthetic oligonucleotide"
gacatgaaaccagcagtcagc

SEQ ID NO: 29838 - DNA, 21 bp, Artificial Sequence
  source: /note="Description of Artificial Sequence: Synthetic oligonucleotide"
gacatgctcaaaaaattcaac

SEQ ID NO: 29839 - DNA, 21 bp, Artificial Sequence
  source: /note="Description of Artificial Sequence: Synthetic oligonucleotide"
gacatgccattcggaccactc

SEQ ID NO: 29840 - DNA, 21 bp, Artificial Sequence
  source: /note="Description of Artificial Sequence: Synthetic oligonucleotide"
gacatgagcgcaagaccaagc

SEQ ID NO: 29841 - DNA, 21 bp, Artificial Sequence
  source: /note="Description of Artificial Sequence: Synthetic oligonucleotide"
gacatgagcacaagaggaatg

SEQ ID NO: 29842 - DNA, 21 bp, Artificial Sequence
  source: /note="Description of Artificial Sequence: Synthetic oligonucleotide"
gacatgacaacaggagcagtc

SEQ ID NO: 29843 - DNA, 21 bp, Artificial Sequence
  source: /note="Description of Artificial Sequence: Synthetic oligonucleotide"
gacatggtcgtcccaagcgac

SEQ ID NO: 29844 - DNA, 21 bp, Artificial Sequence
  source: /note="Description of Artificial Sequence: Synthetic oligonucleotide"
gacatgtacccaacaaacaga

SEQ ID NO: 29845 - DNA, 21 bp, Artificial Sequence
  source: /note="Description of Artificial Sequence: Synthetic oligonucleotide"
gacaacgcaagcaaactcatg

SEQ ID NO: 29846 - DNA, 21 bp, Artificial Sequence
  source: /note="Description of Artificial Sequence: Synthetic oligonucleotide"
gacaacgaactcctcatgagc

SEQ ID NO: 29847 - DNA, 21 bp, Artificial Sequence
  source: /note="Description of Artificial Sequence: Synthetic oligonucleotide"
gacaacgaaagcatcccaaca

SEQ ID NO: 29848 - DNA, 21 bp, Artificial Sequence
  source: /note="Description of Artificial Sequence: Synthetic oligonucleotide"
gacaacggaagcgcagacaac

SEQ ID NO: 29849 - DNA, 21 bp, Artificial Sequence
  source: /note="Description of Artificial Sequence: Synthetic oligonucleotide"
gacaacctcgacggactctgc

SEQ ID NO: 29850 - DNA, 21 bp, Artificial Sequence
  source: /note="Description of Artificial Sequence: Synthetic oligonucleotide"
gacaacctcctcggaagcaga

SEQ ID NO: 29851 - DNA, 21 bp, Artificial Sequence
  source: /note="Description of Artificial Sequence: Synthetic oligonucleotide"
gacaacctcccaacactcgca

SEQ ID NO: 29852 - DNA, 21 bp, Artificial Sequence
  source: /note="Description of Artificial Sequence: Synthetic oligonucleotide"
gacaacctcagaccaagacca

SEQ ID NO: 29853 - DNA, 21 bp, Artificial Sequence
  source: /note="Description of Artificial Sequence: Synthetic oligonucleotide"
gacaacctcagccacagaatg

SEQ ID NO: 29854 - DNA, 21 bp, Artificial Sequence
  source: /note="Description of Artificial Sequence: Synthetic oligonucleotide"
gacaacccagcaatggacaga

SEQ ID NO: 29855 - DNA, 21 bp, Artificial Sequence
  source: /note="Description of Artificial Sequence: Synthetic oligonucleotide"
gacaacccaccaacaggagtc

SEQ ID NO: 29856 - DNA, 21 bp, Artificial Sequence
  source: /note="Description of Artificial Sequence: Synthetic oligonucleotide"
gacaaccaagcagcagtccca

SEQ ID NO: 29857 - DNA, 21 bp, Artificial Sequence
  source: /note="Description of Artificial Sequence: Synthetic oligonucleotide"
gacaacagactcaacgtcgtc

SEQ ID NO: 29858 - DNA, 21 bp, Artificial Sequence
  source: /note="Description of Artificial Sequence: Synthetic oligonucleotide"
gacaacagaccaagactcatg

SEQ ID NO: 29859 - DNA, 21 bp, Artificial Sequence
  source: /note="Description of Artificial Sequence: Synthetic oligonucleotide"
gacaacagagtcagcatccca

SEQ ID NO: 29860 - DNA, 21 bp, Artificial Sequence
  source: /note="Description of Artificial Sequence: Synthetic oligonucleotide"
gacaacagcgcattcgcagtc

SEQ ID NO: 29861 - DNA, 21 bp, Artificial Sequence
  source: /note="Description of Artificial Sequence: Synthetic oligonucleotide"
gacaacacaaactgggcaaaa

SEQ ID NO: 29862 - DNA, 21 bp, Artificial Sequence
  source: /note="Description of Artificial Sequence: Synthetic oligonucleotide"
gacaacacaacaagaacagca

SEQ ID NO: 29863 - DNA, 21 bp, Artificial Sequence
  source: /note="Description of Artificial Sequence: Synthetic oligonucleotide"
gacaacgtcggaatcaaaagc

SEQ ID NO: 29864 - DNA, 21 bp, Artificial Sequence
  source: /note="Description of Artificial Sequence: Synthetic oligonucleotide"
gacaactacgacccaagacca

SEQ ID NO: 29865 - DNA, 21 bp, Artificial Sequence
  source: /note="Description of Artificial Sequence: Synthetic oligonucleotide"
gacccagcagcaacactccca

SEQ ID NO: 29866 - DNA, 21 bp, Artificial Sequence
  source: /note="Description of Artificial Sequence: Synthetic oligonucleotide"
gacccagcactccaaagagca

SEQ ID NO: 29867 - DNA, 21 bp, Artificial Sequence
  source: /note="Description of Artificial Sequence: Synthetic oligonucleotide"
gacccagcaccaacactccca

SEQ ID NO: 29868 - DNA, 21 bp, Artificial Sequence
  source: /note="Description of Artificial Sequence: Synthetic oligonucleotide"
gacccatgccacagaagcctc

SEQ ID NO: 29869 - DNA, 21 bp, Artificial Sequence
  source: /note="Description of Artificial Sequence: Synthetic oligonucleotide"
gacccagacccagcaagcaac

SEQ ID NO: 29870 - DNA, 21 bp, Artificial Sequence
  source: /note="Description of Artificial Sequence: Synthetic oligonucleotide"
gacccagacccaagcctcagc

SEQ ID NO: 29871 - DNA, 21 bp, Artificial Sequence
  source: /note="Description of Artificial Sequence: Synthetic oligonucleotide"
gacccagaagtcgacccagac

SEQ ID NO: 29872 - DNA, 21 bp, Artificial Sequence
  source: /note="Description of Artificial Sequence: Synthetic oligonucleotide"
gacccattcacacacaacgga

SEQ ID NO: 29873 - DNA, 21 bp, Artificial Sequence
  source: /note="Description of Artificial Sequence: Synthetic oligonucleotide"
gacccaggacaccaaagaaca

SEQ ID NO: 29874 - DNA, 21 bp, Artificial Sequence
  source: /note="Description of Artificial Sequence: Synthetic oligonucleotide"
gacccaggactcagaacagac

SEQ ID NO: 29875 - DNA, 21 bp, Artificial Sequence
  source: /note="Description of Artificial Sequence: Synthetic oligonucleotide"
gacccaggaatggtcccagga

SEQ ID NO: 29876 - DNA, 21 bp, Artificial Sequence
  source: /note="Description of Artificial Sequence: Synthetic oligonucleotide"
gacccacacggaaaataccca

SEQ ID NO: 29877 - DNA, 21 bp, Artificial Sequence
  source: /note="Description of Artificial Sequence: Synthetic oligonucleotide"
gacccacacctcagcagccca

SEQ ID NO: 29878 - DNA, 21 bp, Artificial Sequence
  source: /note="Description of Artificial Sequence: Synthetic oligonucleotide"
gacccaatcgcagcaccaaca

SEQ ID NO: 29879 - DNA, 21 bp, Artificial Sequence
  source: /note="Description of Artificial Sequence: Synthetic oligonucleotide"
gacccactcgcaccaatggca

SEQ ID NO: 29880 - DNA, 21 bp, Artificial Sequence
  source: /note="Description of Artificial Sequence: Synthetic oligonucleotide"
gacccactctacagcagcaga

SEQ ID NO: 29881 - DNA, 21 bp, Artificial Sequence
  source: /note="Description of Artificial Sequence: Synthetic oligonucleotide"
gacccaatggcaagagtcgga

SEQ ID NO: 29882 - DNA, 21 bp, Artificial Sequence
  source: /note="Description of Artificial Sequence: Synthetic oligonucleotide"
gacccaaacctcaacctcgca

SEQ ID NO: 29883 - DNA, 21 bp, Artificial Sequence
  source: /note="Description of Artificial Sequence: Synthetic oligonucleotide"
gacccaccactcatggcaaac

SEQ ID NO: 29884 - DNA, 21 bp, Artificial Sequence
  source: /note="Description of Artificial Sequence: Synthetic oligonucleotide"
gacccaccatacgcagtcagc

SEQ ID NO: 29885 - DNA, 21 bp, Artificial Sequence
  source: /note="Description of Artificial Sequence: Synthetic oligonucleotide"
gacccaccatacgaccaaaga

SEQ ID NO: 29886 - DNA, 21 bp, Artificial Sequence
  source: /note="Description of Artificial Sequence: Synthetic oligonucleotide"
gacccacaagaaaaccacgca

SEQ ID NO: 29887 - DNA, 21 bp, Artificial Sequence
  source: /note="Description of Artificial Sequence: Synthetic oligonucleotide"
gacccacaaagactcgtcatc

SEQ ID NO: 29888 - DNA, 21 bp, Artificial Sequence
  source: /note="Description of Artificial Sequence: Synthetic oligonucleotide"
gacccaagattcacactccca

SEQ ID NO: 29889 - DNA, 21 bp, Artificial Sequence
  source: /note="Description of Artificial Sequence: Synthetic oligonucleotide"
gacccaagaaaaagcagcgca

SEQ ID NO: 29890 - DNA, 21 bp, Artificial Sequence
  source: /note="Description of Artificial Sequence: Synthetic oligonucleotide"
gacccaagactcccaagctac

SEQ ID NO: 29891 - DNA, 21 bp, Artificial Sequence
  source: /note="Description of Artificial Sequence: Synthetic oligonucleotide"
gacccaagaccactcgcaagc

SEQ ID NO: 29892 - DNA, 21 bp, Artificial Sequence
  source: /note="Description of Artificial Sequence: Synthetic oligonucleotide"
gacccaagaagcgcagtccaa

SEQ ID NO: 29893 - DNA, 21 bp, Artificial Sequence
  source: /note="Description of Artificial Sequence: Synthetic oligonucleotide"
gacccaagaagcagcctcaca

SEQ ID NO: 29894 - DNA, 21 bp, Artificial Sequence
  source: /note="Description of Artificial Sequence: Synthetic oligonucleotide"
gacccaagaacagaaatggtc

SEQ ID NO: 29895 - DNA, 21 bp, Artificial Sequence
  source: /note="Description of Artificial Sequence: Synthetic oligonucleotide"
gacccaagcgacgactacgtc

SEQ ID NO: 29896 - DNA, 21 bp, Artificial Sequence
  source: /note="Description of Artificial Sequence: Synthetic oligonucleotide"
gacccaagcagaagaccaagc

SEQ ID NO: 29897 - DNA, 21 bp, Artificial Sequence
  source: /note="Description of Artificial Sequence: Synthetic oligonucleotide"
gacccaagcagcctcagactc

SEQ ID NO: 29898 - DNA, 21 bp, Artificial Sequence
  source: /note="Description of Artificial Sequence: Synthetic oligonucleotide"
gacccaagctacgaccaacac

SEQ ID NO: 29899 - DNA, 21 bp, Artificial Sequence
  source: /note="Description of Artificial Sequence: Synthetic oligonucleotide"
gacccaacattcagcagcgaa

SEQ ID NO: 29900 - DNA, 21 bp, Artificial Sequence
  source: /note="Description of Artificial Sequence: Synthetic oligonucleotide"
gacccaacacacagaatcgtc

SEQ ID NO: 29901 - DNA, 21 bp, Artificial Sequence
  source: /note="Description of Artificial Sequence: Synthetic oligonucleotide"
gacccaacactccacagacca

SEQ ID NO: 29902 - DNA, 21 bp, Artificial Sequence
  source: /note="Description of Artificial Sequence: Synthetic oligonucleotide"
gacccaacatacagaggagga

SEQ ID NO: 29903 - DNA, 21 bp, Artificial Sequence
  source: /note="Description of Artificial Sequence: Synthetic oligonucleotide"
gacccagtcggaagaagcctc

SEQ ID NO: 29904 - DNA, 21 bp, Artificial Sequence
  source: /note="Description of Artificial Sequence: Synthetic oligonucleotide"
gacccagtcatcagagcagca

SEQ ID NO: 29905 - DNA, 21 bp, Artificial Sequence
  source: /note="Description of Artificial Sequence: Synthetic oligonucleotide"
gacccagtcatgccaagaaga

SEQ ID NO: 29906 - DNA, 21 bp, Artificial Sequence
  source: /note="Description of Artificial Sequence: Synthetic oligonucleotide"
gacccagtcagcagcagagca

SEQ ID NO: 29907 - DNA, 21 bp, Artificial Sequence
  source: /note="Description of Artificial Sequence: Synthetic oligonucleotide"
gaccaagcaatgagcagaaac

SEQ ID NO: 29908 - DNA, 21 bp, Artificial Sequence
  source: /note="Description of Artificial Sequence: Synthetic oligonucleotide"
gaccaagacaaaagcgcaagc

SEQ ID NO: 29909 - DNA, 21 bp, Artificial Sequence
  source: /note="Description of Artificial Sequence: Synthetic oligonucleotide"
gaccaagaccaaggaagagca

SEQ ID NO: 29910 - DNA, 21 bp, Artificial Sequence
  source: /note="Description of Artificial Sequence: Synthetic oligonucleotide"
gaccaattccacccaagacca

SEQ ID NO: 29911 - DNA, 21 bp, Artificial Sequence
  source: /note="Description of Artificial Sequence: Synthetic oligonucleotide"
gaccaactcaacccaagagga

SEQ ID NO: 29912 - DNA, 21 bp, Artificial Sequence
  source: /note="Description of Artificial Sequence: Synthetic oligonucleotide"
gaccaactcagaagcgcaaca

SEQ ID NO: 29913 - DNA, 21 bp, Artificial Sequence
  source: /note="Description of Artificial Sequence: Synthetic oligonucleotide"
gaccaaccagcatacaacgca

SEQ ID NO: 29914 - DNA, 21 bp, Artificial Sequence
  source: /note="Description of Artificial Sequence: Synthetic oligonucleotide"
gaccaacaattcgaaatggga

SEQ ID NO: 29915 - DNA, 21 bp, Artificial Sequence
  source: /note="Description of Artificial Sequence: Synthetic oligonucleotide"
gaccaacaaagcttcacaaga

SEQ ID NO: 29916 - DNA, 21 bp, Artificial Sequence
  source: /note="Description of Artificial Sequence: Synthetic oligonucleotide"
gaccaaagagcaagcagccca

SEQ ID NO: 29917 - DNA, 21 bp, Artificial Sequence
  source: /note="Description of Artificial Sequence: Synthetic oligonucleotide"
gaccaaagactccaaatgatc

SEQ ID NO: 29918 - DNA, 21 bp, Artificial Sequence
  source: /note="Description of Artificial Sequence: Synthetic oligonucleotide"
gaccaaagcggaacagtcagc

SEQ ID NO: 29919 - DNA, 21 bp, Artificial Sequence
  source: /note="Description of Artificial Sequence: Synthetic oligonucleotide"
gaccaaagcccaggaatgaaa

SEQ ID NO: 29920 - DNA, 21 bp, Artificial Sequence
  source: /note="Description of Artificial Sequence: Synthetic oligonucleotide"
gacagagcactcagcatggga

SEQ ID NO: 29921 - DNA, 21 bp, Artificial Sequence
  source: /note="Description of Artificial Sequence: Synthetic oligonucleotide"
gacagagacacaagcagcttc

SEQ ID NO: 29922 - DNA, 21 bp, Artificial Sequence
  source: /note="Description of Artificial Sequence: Synthetic oligonucleotide"
gacagagaaagaccatacagc

SEQ ID NO: 29923 - DNA, 21 bp, Artificial Sequence
  source: /note="Description of Artificial Sequence: Synthetic oligonucleotide"
gacagattcaacagctacgca

SEQ ID NO: 29924 - DNA, 21 bp, Artificial Sequence
  source: /note="Description of Artificial Sequence: Synthetic oligonucleotide"
gacagaggatgcaaagacaca

SEQ ID NO: 29925 - DNA, 21 bp, Artificial Sequence
  source: /note="Description of Artificial Sequence: Synthetic oligonucleotide"
gacagaggaggattcaacgac

SEQ ID NO: 29926 - DNA, 21 bp, Artificial Sequence
  source: /note="Description of Artificial Sequence: Synthetic oligonucleotide"
gacagaggactcagaacagca

SEQ ID NO: 29927 - DNA, 21 bp, Artificial Sequence
  source: /note="Description of Artificial Sequence: Synthetic oligonucleotide"
gacagaggaaacggaccaaga

SEQ ID NO: 29928 - DNA, 21 bp, Artificial Sequence
  source: /note="Description of Artificial Sequence: Synthetic oligonucleotide"
gacagaggaagcgacctcagc

SEQ ID NO: 29929 - DNA, 21 bp, Artificial Sequence
  source: /note="Description of Artificial Sequence: Synthetic oligonucleotide"
gacagaggaagcctcgcaaga

SEQ ID NO: 29930 - DNA, 21 bp, Artificial Sequence
  source: /note="Description of Artificial Sequence: Synthetic oligonucleotide"
gacagaatcgaaacacaacca

SEQ ID NO: 29931 - DNA, 21 bp, Artificial Sequence
  source: /note="Description of Artificial Sequence: Synthetic oligonucleotide"
gacagaatcatgcaagaacac

SEQ ID NO: 29932 - DNA, 21 bp, Artificial Sequence
  source: /note="Description of Artificial Sequence: Synthetic oligonucleotide"
gacagaatccaaacagcacca

SEQ ID NO: 29933 - DNA, 21 bp, Artificial Sequence
  source: /note="Description of Artificial Sequence: Synthetic oligonucleotide"
gacagaaaaaaactcaacgaa

SEQ ID NO: 29934 - DNA, 21 bp, Artificial Sequence
  source: /note="Description of Artificial Sequence: Synthetic oligonucleotide"
gacagaaaactcgtcacacca

SEQ ID NO: 29935 - DNA, 21 bp, Artificial Sequence
  source: /note="Description of Artificial Sequence: Synthetic oligonucleotide"
gacagactcgcaacaatgagc

SEQ ID NO: 29936 - DNA, 21 bp, Artificial Sequence
  source: /note="Description of Artificial Sequence: Synthetic oligonucleotide"
gacagactcaaccaaagagga

SEQ ID NO: 29937 - DNA, 21 bp, Artificial Sequence
  source: /note="Description of Artificial Sequence: Synthetic oligonucleotide"
gacagaatgacaaacgcagtc

SEQ ID NO: 29938 - DNA, 21 bp, Artificial Sequence
  source: /note="Description of Artificial Sequence: Synthetic oligonucleotide"
gacagaaacctcgtcacaaga

SEQ ID NO: 29939 - DNA, 21 bp, Artificial Sequence
  source: /note="Description of Artificial Sequence: Synthetic oligonucleotide"
gacagaaacgtcaaacacgtc

SEQ ID NO: 29940 - DNA, 21 bp, Artificial Sequence
  source: /note="Description of Artificial Sequence: Synthetic oligonucleotide"
gacagaccattcgaagcacca

SEQ ID NO: 29941 - DNA, 21 bp, Artificial Sequence
  source: /note="Description of Artificial Sequence: Synthetic oligonucleotide"
gacagaccaggaggaaaacca

SEQ ID NO: 29942 - DNA, 21 bp, Artificial Sequence
  source: /note="Description of Artificial Sequence: Synthetic oligonucleotide"
gacagaccactccacgtcgtc

SEQ ID NO: 29943 - DNA, 21 bp, Artificial Sequence
  source: /note="Description of Artificial Sequence: Synthetic oligonucleotide"
gacagaccaccatgcagcaga

SEQ ID NO: 29944 - DNA, 21 bp, Artificial Sequence
  source: /note="Description of Artificial Sequence: Synthetic oligonucleotide"
gacagaccaagcagcccactc

SEQ ID NO: 29945 - DNA, 21 bp, Artificial Sequence
  source: /note="Description of Artificial Sequence: Synthetic oligonucleotide"
gacagacaaagaccactcagc

SEQ ID NO: 29946 - DNA, 21 bp, Artificial Sequence
  source: /note="Description of Artificial Sequence: Synthetic oligonucleotide"
gacagacaaacactcacaaga

SEQ ID NO: 29947 - DNA, 21 bp, Artificial Sequence
  source: /note="Description of Artificial Sequence: Synthetic oligonucleotide"
gacagaagaatgggagtcgca

SEQ ID NO: 29948 - DNA, 21 bp, Artificial Sequence
  source: /note="Description of Artificial Sequence: Synthetic oligonucleotide"
gacagaagaccagcacacgac

SEQ ID NO: 29949 - DNA, 21 bp, Artificial Sequence
  source: /note="Description of Artificial Sequence: Synthetic oligonucleotide"
gacagaagaagcgaagaaaga

SEQ ID NO: 29950 - DNA, 21 bp, Artificial Sequence
  source: /note="Description of Artificial Sequence: Synthetic oligonucleotide"
gacagaagcgcagcaatcatc

SEQ ID NO: 29951 - DNA, 21 bp, Artificial Sequence
  source: /note="Description of Artificial Sequence: Synthetic oligonucleotide"
gacagaagcggaccaaacgaa

SEQ ID NO: 29952 - DNA, 21 bp, Artificial Sequence
  source: /note="Description of Artificial Sequence: Synthetic oligonucleotide"
gacagaagcatcgcactcaga

SEQ ID NO: 29953 - DNA, 21 bp, Artificial Sequence
  source: /note="Description of Artificial Sequence: Synthetic oligonucleotide"
gacagaagcctcgcattcgca

SEQ ID NO: 29954 - DNA, 21 bp, Artificial Sequence
  source: /note="Description of Artificial Sequence: Synthetic oligonucleotide"
gacagaagcctcagaagcctc

SEQ ID NO: 29955 - DNA, 21 bp, Artificial Sequence
  source: /note="Description of Artificial Sequence: Synthetic oligonucleotide"
gacagaagcaacgcaggacac

SEQ ID NO: 29956 - DNA, 21 bp, Artificial Sequence
  source: /note="Description of Artificial Sequence: Synthetic oligonucleotide"
gacagaagccaactcacagca

SEQ ID NO: 29957 - DNA, 21 bp, Artificial Sequence
  source: /note="Description of Artificial Sequence: Synthetic oligonucleotide"
gacagaagccaagtcctccac

SEQ ID NO: 29958 - DNA, 21 bp, Artificial Sequence
  source: /note="Description of Artificial Sequence: Synthetic oligonucleotide"
gacagaagcgtcgtcctcaac

SEQ ID NO: 29959 - DNA, 21 bp, Artificial Sequence
  source: /note="Description of Artificial Sequence: Synthetic oligonucleotide"
gacagaacagcaagagcacca

SEQ ID NO: 29960 - DNA, 21 bp, Artificial Sequence
  source: /note="Description of Artificial Sequence: Synthetic oligonucleotide"
gacagaacaaaaagcagcaca

SEQ ID NO: 29961 - DNA, 21 bp, Artificial Sequence
  source: /note="Description of Artificial Sequence: Synthetic oligonucleotide"
gacagaacaacagtcccacca

SEQ ID NO: 29962 - DNA, 21 bp, Artificial Sequence
  source: /note="Description of Artificial Sequence: Synthetic oligonucleotide"
gacagaacagtcagcctcctc

SEQ ID NO: 29963 - DNA, 21 bp, Artificial Sequence
  source: /note="Description of Artificial Sequence: Synthetic oligonucleotide"
gacagagtccacagcagcagc

SEQ ID NO: 29964 - DNA, 21 bp, Artificial Sequence
  source: /note="Description of Artificial Sequence: Synthetic oligonucleotide"
gacagagtcagcacaagcaaa

SEQ ID NO: 29965 - DNA, 21 bp, Artificial Sequence
  source: /note="Description of Artificial Sequence: Synthetic oligonucleotide"
gacagagtcacaccagaacca

SEQ ID NO: 29966 - DNA, 21 bp, Artificial Sequence
  source: /note="Description of Artificial Sequence: Synthetic oligonucleotide"
gacagatggacaagcagcagc

SEQ ID NO: 29967 - DNA, 21 bp, Artificial Sequence
  source: /note="Description of Artificial Sequence: Synthetic oligonucleotide"
gacagcgcaccagtcgcacac

SEQ ID NO: 29968 - DNA, 21 bp, Artificial Sequence
  source: /note="Description of Artificial Sequence: Synthetic oligonucleotide"
gacagcgcaagaagcgcaatc

SEQ ID NO: 29969 - DNA, 21 bp, Artificial Sequence
  source: /note="Description of Artificial Sequence: Synthetic oligonucleotide"
gacagcgacatgatgggagaa

SEQ ID NO: 29970 - DNA, 21 bp, Artificial Sequence
  source: /note="Description of Artificial Sequence: Synthetic oligonucleotide"
gacagcgacagagacagcaaa

SEQ ID NO: 29971 - DNA, 21 bp, Artificial Sequence
  source: /note="Description of Artificial Sequence: Synthetic oligonucleotide"
gacagcgacagactcagcgca

SEQ ID NO: 29972 - DNA, 21 bp, Artificial Sequence
  source: /note="Description of Artificial Sequence: Synthetic oligonucleotide"
gacagcgaaaaaacaatccca

SEQ ID NO: 29973 - DNA, 21 bp, Artificial Sequence
  source: /note="Description of Artificial Sequence: Synthetic oligonucleotide"
gacagcgaagtcccaatgtac

SEQ ID NO: 29974 - DNA, 21 bp, Artificial Sequence
  source: /note="Description of Artificial Sequence: Synthetic oligonucleotide"
gacagcgaagtcagccaccca

SEQ ID NO: 29975 - DNA, 21 bp, Artificial Sequence
  source: /note="Description of Artificial Sequence: Synthetic oligonucleotide"
gacagcttcggaagaccacaa

SEQ ID NO: 29976 - DNA, 21 bp, Artificial Sequence
  source: /note="Description of Artificial Sequence: Synthetic oligonucleotide"
gacagcggagcaagcctcgga

SEQ ID NO: 29977 - DNA, 21 bp, Artificial Sequence
  source: /note="Description of Artificial Sequence: Synthetic oligonucleotide"
gacagcggagacccagcaaga

SEQ ID NO: 29978 - DNA, 21 bp, Artificial Sequence
  source: /note="Description of Artificial Sequence: Synthetic oligonucleotide"
gacagcggaatcggataccca

SEQ ID NO: 29979 - DNA, 21 bp, Artificial Sequence
  source: /note="Description of Artificial Sequence: Synthetic oligonucleotide"
gacagcggaagcaacggactc

SEQ ID NO: 29980 - DNA, 21 bp, Artificial Sequence
  source: /note="Description of Artificial Sequence: Synthetic oligonucleotide"
gacagccactacagagtccca

SEQ ID NO: 29981 - DNA, 21 bp, Artificial Sequence
  source: /note="Description of Artificial Sequence: Synthetic oligonucleotide"
gacagcatcgacccaaaattc

SEQ ID NO: 29982 - DNA, 21 bp, Artificial Sequence
  source: /note="Description of Artificial Sequence: Synthetic oligonucleotide"
gacagcatcggaccaggaaca

SEQ ID NO: 29983 - DNA, 21 bp, Artificial Sequence
  source: /note="Description of Artificial Sequence: Synthetic oligonucleotide"
gacagcatccacatcatggca

SEQ ID NO: 29984 - DNA, 21 bp, Artificial Sequence
  source: /note="Description of Artificial Sequence: Synthetic oligonucleotide"
gacagcatcagcagcagagca

SEQ ID NO: 29985 - DNA, 21 bp, Artificial Sequence
  source: /note="Description of Artificial Sequence: Synthetic oligonucleotide"
gacagcatcacaagagcaagc

SEQ ID NO: 29986 - DNA, 21 bp, Artificial Sequence
  source: /note="Description of Artificial Sequence: Synthetic oligonucleotide"
gacagcatcacaacaagaatc

SEQ ID NO: 29987 - DNA, 21 bp, Artificial Sequence
  source: /note="Description of Artificial Sequence: Synthetic oligonucleotide"
gacagcaaaagaacaatcaca

SEQ ID NO: 29988 - DNA, 21 bp, Artificial Sequence
  source: /note="Description of Artificial Sequence: Synthetic oligonucleotide"
gacagcctcgcaagcagacca

SEQ ID NO: 29989 - DNA, 21 bp, Artificial Sequence
  source: /note="Description of Artificial Sequence: Synthetic oligonucleotide"
gacagcctcggaaaaagaagc

SEQ ID NO: 29990 - DNA, 21 bp, Artificial Sequence
  source: /note="Description of Artificial Sequence: Synthetic oligonucleotide"
gacagcctcaaactcagcagc

SEQ ID NO: 29991 - DNA, 21 bp, Artificial Sequence
  source: /note="Description of Artificial Sequence: Synthetic oligonucleotide"
gacagcatggaactctacagc

SEQ ID NO: 29992 - DNA, 21 bp, Artificial Sequence
  source: /note="Description of Artificial Sequence: Synthetic oligonucleotide"
gacagcatgggagcaagcgga

SEQ ID NO: 29993 - DNA, 21 bp, Artificial Sequence
  source: /note="Description of Artificial Sequence: Synthetic oligonucleotide"
gacagcaacatcccaccaaga

SEQ ID NO: 29994 - DNA, 21 bp, Artificial Sequence
  source: /note="Description of Artificial Sequence: Synthetic oligonucleotide"
gacagcaacaacgaaaaaagc

SEQ ID NO: 29995 - DNA, 21 bp, Artificial Sequence
  source: /note="Description of Artificial Sequence: Synthetic oligonucleotide"
gacagcaacccaagcctcagc

SEQ ID NO: 29996 - DNA, 21 bp, Artificial Sequence
  source: /note="Description of Artificial Sequence: Synthetic oligonucleotide"
gacagcaacagactcgtcgac

SEQ ID NO: 29997 - DNA, 21 bp, Artificial Sequence
  source: /note="Description of Artificial Sequence: Synthetic oligonucleotide"
gacagcccaaaatacagccac

SEQ ID NO: 29998 - DNA, 21 bp, Artificial Sequence
  source: /note="Description of Artificial Sequence: Synthetic oligonucleotide"
gacagcccaagcttcgtcctc

SEQ ID NO: 29999 - DNA, 21 bp, Artificial Sequence
  source: /note="Description of Artificial Sequence: Synthetic oligonucleotide"
gacagccaaatctacgtcagc

SEQ ID NO: 30000 - DNA, 21 bp, Artificial Sequence
  source: /note="Description of Artificial Sequence: Synthetic oligonucleotide"
gacagccaactcaacgcacca

SEQ ID NO: 30001 - DNA, 21 bp, Artificial Sequence
  source: /note="Description of Artificial Sequence: Synthetic oligonucleotide"
gacagccaaatgagaacaatg

SEQ ID NO: 30002 - DNA, 21 bp, Artificial Sequence
  source: /note="Description of Artificial Sequence: Synthetic oligonucleotide"
gacagcagaatcgcagcactc

SEQ ID NO: 30003 - DNA, 21 bp, Artificial Sequence
  source: /note="Description of Artificial Sequence: Synthetic oligonucleotide"
gacagcagactcctcagcgga

SEQ ID NO: 30004 - DNA, 21 bp, Artificial Sequence
  source: /note="Description of Artificial Sequence: Synthetic oligonucleotide"
gacagcagaatggcagcaagc

SEQ ID NO: 30005 - DNA, 21 bp, Artificial Sequence
  source: /note="Description of Artificial Sequence: Synthetic oligonucleotide"
gacagcagaaacgcagtcaca

SEQ ID NO: 30006 - DNA, 21 bp, Artificial Sequence
  source: /note="Description of Artificial Sequence: Synthetic oligonucleotide"
gacagcagaccactcagcgtc

SEQ ID NO: 30007 - DNA, 21 bp, Artificial Sequence
  source: /note="Description of Artificial Sequence: Synthetic oligonucleotide"
gacagcagacaaggaagagtc

SEQ ID NO: 30008 - DNA, 21 bp, Artificial Sequence
  source: /note="Description of Artificial Sequence: Synthetic oligonucleotide"
gacagcagaagcctcagagca

SEQ ID NO: 30009 - DNA, 21 bp, Artificial Sequence
  source: /note="Description of Artificial Sequence: Synthetic oligonucleotide"
gacagcagcgcaaaagaaagc

SEQ ID NO: 30010 - DNA, 21 bp, Artificial Sequence
  source: /note="Description of Artificial Sequence: Synthetic oligonucleotide"
gacagcagcgaatacagccca

SEQ ID NO: 30011 - DNA, 21 bp, Artificial Sequence
  source: /note="Description of Artificial Sequence: Synthetic oligonucleotide"
gacagcagccacacactccaa

SEQ ID NO: 30012 - DNA, 21 bp, Artificial Sequence
  source: /note="Description of Artificial Sequence: Synthetic oligonucleotide"
gacagcagccacacaatgatg

SEQ ID NO: 30013 - DNA, 21 bp, Artificial Sequence
  source: /note="Description of Artificial Sequence: Synthetic oligonucleotide"
gacagcagccactacccagga

SEQ ID NO: 30014 - DNA, 21 bp, Artificial Sequence
  source: /note="Description of Artificial Sequence: Synthetic oligonucleotide"
gacagcagcccactcgtcaga

SEQ ID NO: 30015 - DNA, 21 bp, Artificial Sequence
  source: /note="Description of Artificial Sequence: Synthetic oligonucleotide"
gacagcacaccagaagaagga

SEQ ID NO: 30016 - DNA, 21 bp, Artificial Sequence
  source: /note="Description of Artificial Sequence: Synthetic oligonucleotide"
gacagcacacaattcccaaga

SEQ ID NO: 30017 - DNA, 21 bp, Artificial Sequence
  source: /note="Description of Artificial Sequence: Synthetic oligonucleotide"
gacagcgtccacctcggaaga

SEQ ID NO: 30018 - DNA, 21 bp, Artificial Sequence
  source: /note="Description of Artificial Sequence: Synthetic oligonucleotide"
gacagcgtcaaagcaagccaa

SEQ ID NO: 30019 - DNA, 21 bp, Artificial Sequence
  source: /note="Description of Artificial Sequence: Synthetic oligonucleotide"
gacacagcagcaaaagacagc

SEQ ID NO: 30020 - DNA, 21 bp, Artificial Sequence
  source: /note="Description of Artificial Sequence: Synthetic oligonucleotide"
gacacagcaagcagactcgca

SEQ ID NO: 30021 - DNA, 21 bp, Artificial Sequence
  source: /note="Description of Artificial Sequence: Synthetic oligonucleotide"
gacacagacggacaaagagca

SEQ ID NO: 30022 - DNA, 21 bp, Artificial Sequence
  source: /note="Description of Artificial Sequence: Synthetic oligonucleotide"
gacacacacgcatacgacgga

SEQ ID NO: 30023 - DNA, 21 bp, Artificial Sequence
  source: /note="Description of Artificial Sequence: Synthetic oligonucleotide"
gacacacacatcatcgcaagc

SEQ ID NO: 30024 - DNA, 21 bp, Artificial Sequence
  source: /note="Description of Artificial Sequence: Synthetic oligonucleotide"
gacacacacagaagcgaaaga

SEQ ID NO: 30025 - DNA, 21 bp, Artificial Sequence
  source: /note="Description of Artificial Sequence: Synthetic oligonucleotide"
gacacacacgtcatcgcaagc

SEQ ID NO: 30026 - DNA, 21 bp, Artificial Sequence
  source: /note="Description of Artificial Sequence: Synthetic oligonucleotide"
gacacaatcgcacacgcacca

SEQ ID NO: 30027 - DNA, 21 bp, Artificial Sequence
  source: /note="Description of Artificial Sequence: Synthetic oligonucleotide"
gacacactcgcactcagctgc

SEQ ID NO: 30028 - DNA, 21 bp, Artificial Sequence
  source: /note="Description of Artificial Sequence: Synthetic oligonucleotide"
gacacactcgcaaacagcgca

SEQ ID NO: 30029 - DNA, 21 bp, Artificial Sequence
  source: /note="Description of Artificial Sequence: Synthetic oligonucleotide"
gacacactcggactcgaacca

SEQ ID NO: 30030 - DNA, 21 bp, Artificial Sequence
  source: /note="Description of Artificial Sequence: Synthetic oligonucleotide"
gacacactcatgatcagagga

SEQ ID NO: 30031 - DNA, 21 bp, Artificial Sequence
  source: /note="Description of Artificial Sequence: Synthetic oligonucleotide"
gacacactcagcacaacaaga

SEQ ID NO: 30032 - DNA, 21 bp, Artificial Sequence
  source: /note="Description of Artificial Sequence: Synthetic oligonucleotide"
gacacaaacatgctccacgtc

SEQ ID NO: 30033 - DNA, 21 bp, Artificial Sequence
  source: /note="Description of Artificial Sequence: Synthetic oligonucleotide"
gacacaccagacgcactcaga

SEQ ID NO: 30034 - DNA, 21 bp, Artificial Sequence
  source: /note="Description of Artificial Sequence: Synthetic oligonucleotide"
gacacaccacacctcagcctc

SEQ ID NO: 30035 - DNA, 21 bp, Artificial Sequence
  source: /note="Description of Artificial Sequence: Synthetic oligonucleotide"
gacacaccactcgaactcgca

SEQ ID NO: 30036 - DNA, 21 bp, Artificial Sequence
  source: /note="Description of Artificial Sequence: Synthetic oligonucleotide"
gacacaccaatgccaaaaatc

SEQ ID NO: 30037 - DNA, 21 bp, Artificial Sequence
  source: /note="Description of Artificial Sequence: Synthetic oligonucleotide"
gacacaccaaacgacacagca

SEQ ID NO: 30038 - DNA, 21 bp, Artificial Sequence
  source: /note="Description of Artificial Sequence: Synthetic oligonucleotide"
gacacacaacacctcaaacca

SEQ ID NO: 30039 - DNA, 21 bp, Artificial Sequence
  source: /note="Description of Artificial Sequence: Synthetic oligonucleotide"
gacacacaactcccaaaccca

SEQ ID NO: 30040 - DNA, 21 bp, Artificial Sequence
  source: /note="Description of Artificial Sequence: Synthetic oligonucleotide"
gacacacaactcacactcgca

SEQ ID NO: 30041 - DNA, 21 bp, Artificial Sequence
  source: /note="Description of Artificial Sequence: Synthetic oligonucleotide"
gacacacaaagcgtcagcctc

SEQ ID NO: 30042 - DNA, 21 bp, Artificial Sequence
  source: /note="Description of Artificial Sequence: Synthetic oligonucleotide"
gacacaagagcattcacagga

SEQ ID NO: 30043 - DNA, 21 bp, Artificial Sequence
  source: /note="Description of Artificial Sequence: Synthetic oligonucleotide"
gacacaagacacagcgacctc

SEQ ID NO: 30044 - DNA, 21 bp, Artificial Sequence
  source: /note="Description of Artificial Sequence: Synthetic oligonucleotide"
gacacaagaagagaatgcgac

SEQ ID NO: 30045 - DNA, 21 bp, Artificial Sequence
  source: /note="Description of Artificial Sequence: Synthetic oligonucleotide"
gacacaagcagaacaagcctc

SEQ ID NO: 30046 - DNA, 21 bp, Artificial Sequence
  source: /note="Description of Artificial Sequence: Synthetic oligonucleotide"
gacacaagcagcagaatgaca

SEQ ID NO: 30047 - DNA, 21 bp, Artificial Sequence
  source: /note="Description of Artificial Sequence: Synthetic oligonucleotide"
gacacaagctggaaaagcaca

SEQ ID NO: 30048 - DNA, 21 bp, Artificial Sequence
  source: /note="Description of Artificial Sequence: Synthetic oligonucleotide"
gacacaacagaaagaccatgg

SEQ ID NO: 30049 - DNA, 21 bp, Artificial Sequence
  source: /note="Description of Artificial Sequence: Synthetic oligonucleotide"
gacacaacaggaagatacctc

SEQ ID NO: 30050 - DNA, 21 bp, Artificial Sequence
  source: /note="Description of Artificial Sequence: Synthetic oligonucleotide"
gacacaacactcctcagagga

SEQ ID NO: 30051 - DNA, 21 bp, Artificial Sequence
  source: /note="Description of Artificial Sequence: Synthetic oligonucleotide"
gacacaacaccaatcgtcaga

SEQ ID NO: 30052 - DNA, 21 bp, Artificial Sequence
  source: /note="Description of Artificial Sequence: Synthetic oligonucleotide"
gacacatacgcaatcgcaatc

SEQ ID NO: 30053 - DNA, 21 bp, Artificial Sequence
  source: /note="Description of Artificial Sequence: Synthetic oligonucleotide"
gacacatacaacacaccagca

SEQ ID NO: 30054 - DNA, 21 bp, Artificial Sequence
  source: /note="Description of Artificial Sequence: Synthetic oligonucleotide"
gacgtcgcaagcagaagcctc

SEQ ID NO: 30055 - DNA, 21 bp, Artificial Sequence
  source: /note="Description of Artificial Sequence: Synthetic oligonucleotide"
gacgtcgcaagcagcagactc

SEQ ID NO: 30056 - DNA, 21 bp, Artificial Sequence
  source: /note="Description of Artificial Sequence: Synthetic oligonucleotide"
gacgtcgacgacacaatgtgg

SEQ ID NO: 30057 - DNA, 21 bp, Artificial Sequence
  source: /note="Description of Artificial Sequence: Synthetic oligonucleotide"
gacgtcgacctcctcccaaca

SEQ ID NO: 30058 - DNA, 21 bp, Artificial Sequence
  source: /note="Description of Artificial Sequence: Synthetic oligonucleotide"
gacgtcgacagactcaacaca

SEQ ID NO: 30059 - DNA, 21 bp, Artificial Sequence
  source: /note="Description of Artificial Sequence: Synthetic oligonucleotide"
gacgtcgacagccaccacaca

SEQ ID NO: 30060 - DNA, 21 bp, Artificial Sequence
  source: /note="Description of Artificial Sequence: Synthetic oligonucleotide"
gacgtcgacgtcagacacgga

SEQ ID NO: 30061 - DNA, 21 bp, Artificial Sequence
  source: /note="Description of Artificial Sequence: Synthetic oligonucleotide"
gacgtcgaaccactccaaatg

SEQ ID NO: 30062 - DNA, 21 bp, Artificial Sequence
  source: /note="Description of Artificial Sequence: Synthetic oligonucleotide"
gacgtcttcagaacacaacca

SEQ ID NO: 30063 - DNA, 21 bp, Artificial Sequence
  source: /note="Description of Artificial Sequence: Synthetic oligonucleotide"
gacgtcggaacatacggaaga

SEQ ID NO: 30064 - DNA, 21 bp, Artificial Sequence
  source: /note="Description of Artificial Sequence: Synthetic oligonucleotide"
gacgtcaaaacaaacgtctac

SEQ ID NO: 30065 - DNA, 21 bp, Artificial Sequence
  source: /note="Description of Artificial Sequence: Synthetic oligonucleotide"
gacgtcctcttcagcaaaaac

SEQ ID NO: 30066 - DNA, 21 bp, Artificial Sequence
  source: /note="Description of Artificial Sequence: Synthetic oligonucleotide"
gacgtcctcggaaaacacgca

SEQ ID NO: 30067 - DNA, 21 bp, Artificial Sequence
  source: /note="Description of Artificial Sequence: Synthetic oligonucleotide"
gacgtcctcaaaacagacttc

SEQ ID NO: 30068 - DNA, 21 bp, Artificial Sequence
  source: /note="Description of Artificial Sequence: Synthetic oligonucleotide"
gacgtcctcaacagcacagac

SEQ ID NO: 30069 - DNA, 21 bp, Artificial Sequence
  source: /note="Description of Artificial Sequence: Synthetic oligonucleotide"
gacgtcatgagccaactcctc

SEQ ID NO: 30070 - DNA, 21 bp, Artificial Sequence
  source: /note="Description of Artificial Sequence: Synthetic oligonucleotide"
gacgtcccaaacgcaccatgc

SEQ ID NO: 30071 - DNA, 21 bp, Artificial Sequence
  source: /note="Description of Artificial Sequence: Synthetic oligonucleotide"
gacgtcccaaacccaacagga

SEQ ID NO: 30072 - DNA, 21 bp, Artificial Sequence
  source: /note="Description of Artificial Sequence: Synthetic oligonucleotide"
gacgtcccaaacacaatgaca

SEQ ID NO: 30073 - DNA, 21 bp, Artificial Sequence
  source: /note="Description of Artificial Sequence: Synthetic oligonucleotide"
gacgtcccatacagcctcgaa

SEQ ID NO: 30074 - DNA, 21 bp, Artificial Sequence
  source: /note="Description of Artificial Sequence: Synthetic oligonucleotide"
gacgtccaaatgcacaaacac

SEQ ID NO: 30075 - DNA, 21 bp, Artificial Sequence
  source: /note="Description of Artificial Sequence: Synthetic oligonucleotide"
gacgtcagaaacacaagactc

SEQ ID NO: 30076 - DNA, 21 bp, Artificial Sequence
  source: /note="Description of Artificial Sequence: Synthetic oligonucleotide"
gacgtcagacaagcatacttc

SEQ ID NO: 30077 - DNA, 21 bp, Artificial Sequence
  source: /note="Description of Artificial Sequence: Synthetic oligonucleotide"
gacgtcagagtcggacacatc

SEQ ID NO: 30078 - DNA, 21 bp, Artificial Sequence
  source: /note="Description of Artificial Sequence: Synthetic oligonucleotide"
gacgtcagcggaacaatcgga

SEQ ID NO: 30079 - DNA, 21 bp, Artificial Sequence
  source: /note="Description of Artificial Sequence: Synthetic oligonucleotide"
gacgtcagcctcagagtcaca

SEQ ID NO: 30080 - DNA, 21 bp, Artificial Sequence
  source: /note="Description of Artificial Sequence: Synthetic oligonucleotide"
gacgtcagcagcccactcatc

SEQ ID NO: 30081 - DNA, 21 bp, Artificial Sequence
  source: /note="Description of Artificial Sequence: Synthetic oligonucleotide"
gacgtcagcgtcagcgacgtc

SEQ ID NO: 30082 - DNA, 21 bp, Artificial Sequence
  source: /note="Description of Artificial Sequence: Synthetic oligonucleotide"
gacgtcacagtcggaagcagc

SEQ ID NO: 30083 - DNA, 21 bp, Artificial Sequence
  source: /note="Description of Artificial Sequence: Synthetic oligonucleotide"
gacgtcgtcgcaggaccacca

SEQ ID NO: 30084 - DNA, 21 bp, Artificial Sequence
  source: /note="Description of Artificial Sequence: Synthetic oligonucleotide"
gacgtcgtcaacagcctcaac

SEQ ID NO: 30085 - DNA, 21 bp, Artificial Sequence
  source: /note="Description of Artificial Sequence: Synthetic oligonucleotide"
gacgtcgtcccaagaagcgca

SEQ ID NO: 30086 - DNA, 21 bp, Artificial Sequence
  source: /note="Description of Artificial Sequence: Synthetic oligonucleotide"
gactggggaccaaaacaaaga

SEQ ID NO: 30087 - DNA, 21 bp, Artificial Sequence
  source: /note="Description of Artificial Sequence: Synthetic oligonucleotide"
gactggaaaccaaaccacgaa

SEQ ID NO: 30088 - DNA, 21 bp, Artificial Sequence
  source: /note="Description of Artificial Sequence: Synthetic oligonucleotide"
gactggaaacaaacaacagca

SEQ ID NO: 30089 - DNA, 21 bp, Artificial Sequence
  source: /note="Description of Artificial Sequence: Synthetic oligonucleotide"
gactggcaaagacacggacca

SEQ ID NO: 30090 - DNA, 21 bp, Artificial Sequence
  source: /note="Description of Artificial Sequence: Synthetic oligonucleotide"
gactggacacacatcgacaaa

SEQ ID NO: 30091 - DNA, 21 bp, Artificial Sequence
  source: /note="Description of Artificial Sequence: Synthetic oligonucleotide"
gactggacaccaagaacaaca

SEQ ID NO: 30092 - DNA, 21 bp, Artificial Sequence
  source: /note="Description of Artificial Sequence: Synthetic oligonucleotide"
gactacgcaatcggaaaaaca

SEQ ID NO: 30093 - DNA, 21 bp, Artificial Sequence
  source: /note="Description of Artificial Sequence: Synthetic oligonucleotide"
gactacgaaagcttcagcaga

SEQ ID NO: 30094 - DNA, 21 bp, Artificial Sequence
  source: /note="Description of Artificial Sequence: Synthetic oligonucleotide"
gactacggaccagaaatcatc

SEQ ID NO: 30095 - DNA, 21 bp, Artificial Sequence
  source: /note="Description of Artificial Sequence: Synthetic oligonucleotide"
gactacggacaactcagcaac

SEQ ID NO: 30096 - DNA, 21 bp, Artificial Sequence
  source: /note="Description of Artificial Sequence: Synthetic oligonucleotide"
gactaccaccaaatgcacagc

SEQ ID NO: 30097 - DNA, 21 bp, Artificial Sequence
  source: /note="Description of Artificial Sequence: Synthetic oligonucleotide"
gactaccacagagcaccagga

SEQ ID NO: 30098 - DNA, 21 bp, Artificial Sequence
  source: /note="Description of Artificial Sequence: Synthetic oligonucleotide"
gactacccaccagaagtcctc

SEQ ID NO: 30099 - DNA, 21 bp, Artificial Sequence
  source: /note="Description of Artificial Sequence: Synthetic oligonucleotide"
gactacagagaatacacaaga

SEQ ID NO: 30100 - DNA, 21 bp, Artificial Sequence
  source: /note="Description of Artificial Sequence: Synthetic oligonucleotide"
gactacagattcgcagacagc

SEQ ID NO: 30101 - DNA, 21 bp, Artificial Sequence
  source: /note="Description of Artificial Sequence: Synthetic oligonucleotide"
gactacagaatcacaaacagc

SEQ ID NO: 30102 - DNA, 21 bp, Artificial Sequence
  source: /note="Description of Artificial Sequence: Synthetic oligonucleotide"
gactacagactcctcccagaa

SEQ ID NO: 30103 - DNA, 21 bp, Artificial Sequence
  source: /note="Description of Artificial Sequence: Synthetic oligonucleotide"
gactacagacaaatcgaccaa

SEQ ID NO: 30104 - DNA, 21 bp, Artificial Sequence
  source: /note="Description of Artificial Sequence: Synthetic oligonucleotide"
gactacagcgaaatgagcaaa

SEQ ID NO: 30105 - DNA, 21 bp, Artificial Sequence
  source: /note="Description of Artificial Sequence: Synthetic oligonucleotide"
gactacagcagcgcaagagca

SEQ ID NO: 30106 - DNA, 21 bp, Artificial Sequence
  source: /note="Description of Artificial Sequence: Synthetic oligonucleotide"
gactacagcagcagcatgaga

SEQ ID NO: 30107 - DNA, 21 bp, Artificial Sequence
  source: /note="Description of Artificial Sequence: Synthetic oligonucleotide"
gactacacactcacaccaagc

SEQ ID NO: 30108 - DNA, 21 bp, Artificial Sequence
  source: /note="Description of Artificial Sequence: Synthetic oligonucleotide"
gactacgtcccagtcgaactc

SEQ ID NO: 30109 - DNA, 21 bp, Artificial Sequence
  source: /note="Description of Artificial Sequence: Synthetic oligonucleotide"
gaagcagcacacccaggaatg

SEQ ID NO: 30110 - DNA, 21 bp, Artificial Sequence
  source: /note="Description of Artificial Sequence: Synthetic oligonucleotide"
gaagcagcaatgacaagagaa

SEQ ID NO: 30111 - DNA, 21 bp, Artificial Sequence
  source: /note="Description of Artificial Sequence: Synthetic oligonucleotide"
gaagcagcaccaatcccaaga

SEQ ID NO: 30112 - DNA, 21 bp, Artificial Sequence
  source: /note="Description of Artificial Sequence: Synthetic oligonucleotide"
gaagcagcaagcagacacgac

SEQ ID NO: 30113 - DNA, 21 bp, Artificial Sequence
  source: /note="Description of Artificial Sequence: Synthetic oligonucleotide"
gaagcagcaagcagcccaaaa

SEQ ID NO: 30114 - DNA, 21 bp, Artificial Sequence
  source: /note="Description of Artificial Sequence: Synthetic oligonucleotide"
gaagcagcaacactcacaaca

SEQ ID NO: 30115 - DNA, 21 bp, Artificial Sequence
  source: /note="Description of Artificial Sequence: Synthetic oligonucleotide"
gaagcattccacacaagcagc

SEQ ID NO: 30116 - DNA, 21 bp, Artificial Sequence
  source: /note="Description of Artificial Sequence: Synthetic oligonucleotide"
gaagcattcagcggaagaatc

SEQ ID NO: 30117 - DNA, 21 bp, Artificial Sequence
  source: /note="Description of Artificial Sequence: Synthetic oligonucleotide"
gaagcaaaaacaaacagaaca

SEQ ID NO: 30118 - DNA, 21 bp, Artificial Sequence
  source: /note="Description of Artificial Sequence: Synthetic oligonucleotide"
gaagcactcgcagtcagacca

SEQ ID NO: 30119 - DNA, 21 bp, Artificial Sequence
  source: /note="Description of Artificial Sequence: Synthetic oligonucleotide"
gaagcactcagaggaccaatc

SEQ ID NO: 30120 - DNA, 21 bp, Artificial Sequence
  source: /note="Description of Artificial Sequence: Synthetic oligonucleotide"
gaagcaatgcacagcagagca

SEQ ID NO: 30121 - DNA, 21 bp, Artificial Sequence
  source: /note="Description of Artificial Sequence: Synthetic oligonucleotide"
gaagcaaacgacgaaacaaaa

SEQ ID NO: 30122 - DNA, 21 bp, Artificial Sequence
  source: /note="Description of Artificial Sequence: Synthetic oligonucleotide"
gaagcaaacagaagcccaatg

SEQ ID NO: 30123 - DNA, 21 bp, Artificial Sequence
  source: /note="Description of Artificial Sequence: Synthetic oligonucleotide"
gaagcacaaagagcagcacca

SEQ ID NO: 30124 - DNA, 21 bp, Artificial Sequence
  source: /note="Description of Artificial Sequence: Synthetic oligonucleotide"
gaagcaagacacgtctacgca

SEQ ID NO: 30125 - DNA, 21 bp, Artificial Sequence
  source: /note="Description of Artificial Sequence: Synthetic oligonucleotide"
gaagcaagatacgaaagcgga

SEQ ID NO: 30126 - DNA, 21 bp, Artificial Sequence
  source: /note="Description of Artificial Sequence: Synthetic oligonucleotide"
gaagcaagatacgtccacgtc

SEQ ID NO: 30127 - DNA, 21 bp, Artificial Sequence
  source: /note="Description of Artificial Sequence: Synthetic oligonucleotide"
gaagcaagccacttcacaatg

SEQ ID NO: 30128 - DNA, 21 bp, Artificial Sequence
  source: /note="Description of Artificial Sequence: Synthetic oligonucleotide"
gaagcaagcctcgcagcaaaa

SEQ ID NO: 30129 - DNA, 21 bp, Artificial Sequence
  source: /note="Description of Artificial Sequence: Synthetic oligonucleotide"
gaagcaagcaacgcaatcgca

SEQ ID NO: 30130 - DNA, 21 bp, Artificial Sequence
  source: /note="Description of Artificial Sequence: Synthetic oligonucleotide"
gaagcaagcagagtcacagtc

SEQ ID NO: 30131 - DNA, 21 bp, Artificial Sequence
  source: /note="Description of Artificial Sequence: Synthetic oligonucleotide"
gaagcaagcagcatgcacagc

SEQ ID NO: 30132 - DNA, 21 bp, Artificial Sequence
  source: /note="Description of Artificial Sequence: Synthetic oligonucleotide"
gaagcaagcgtcctcacaaga

SEQ ID NO: 30133 - DNA, 21 bp, Artificial Sequence
  source: /note="Description of Artificial Sequence: Synthetic oligonucleotide"
gaagcaagctacatgccacca

SEQ ID NO: 30134 - DNA, 21 bp, Artificial Sequence
  source: /note="Description of Artificial Sequence: Synthetic oligonucleotide"
gaagcaacaatggtcaaagac

SEQ ID NO: 30135 - DNA, 21 bp, Artificial Sequence
  source: /note="Description of Artificial Sequence: Synthetic oligonucleotide"
gaagcaacaaacagacaccca

SEQ ID NO: 30136 - DNA, 21 bp, Artificial Sequence
  source: /note="Description of Artificial Sequence: Synthetic oligonucleotide"
gaagcaacaccaccaacaatc

SEQ ID NO: 30137 - DNA, 21 bp, Artificial Sequence
  source: /note="Description of Artificial Sequence: Synthetic oligonucleotide"
gaagcaacaacaaacttcctc

SEQ ID NO: 30138 - DNA, 21 bp, Artificial Sequence
  source: /note="Description of Artificial Sequence: Synthetic oligonucleotide"
gaagcaacaacaccaatgcca

SEQ ID NO: 30139 - DNA, 21 bp, Artificial Sequence
  source: /note="Description of Artificial Sequence: Synthetic oligonucleotide"
gaagcagtcacaccaagacac

SEQ ID NO: 30140 - DNA, 21 bp, Artificial Sequence
  source: /note="Description of Artificial Sequence: Synthetic oligonucleotide"
gaagcagtcacagtcaaaatg

SEQ ID NO: 30141 - DNA, 21 bp, Artificial Sequence
  source: /note="Description of Artificial Sequence: Synthetic oligonucleotide"
gaagacgcagaaagagaatac

SEQ ID NO: 30142 - DNA, 21 bp, Artificial Sequence
  source: /note="Description of Artificial Sequence: Synthetic oligonucleotide"
gaagacgcaccaccaagcaga

SEQ ID NO: 30143 - DNA, 21 bp, Artificial Sequence
  source: /note="Description of Artificial Sequence: Synthetic oligonucleotide"
gaagacatcagaatgccaagc

SEQ ID NO: 30144 - DNA, 21 bp, Artificial Sequence
  source: /note="Description of Artificial Sequence: Synthetic oligonucleotide"
gaagacaaacaacacctcagc

SEQ ID NO: 30145 - DNA, 21 bp, Artificial Sequence
  source: /note="Description of Artificial Sequence: Synthetic oligonucleotide"
gaagacctcccaggaaaaatg

SEQ ID NO: 30146 - DNA, 21 bp, Artificial Sequence
  source: /note="Description of Artificial Sequence: Synthetic oligonucleotide"
gaagacatgccacaactcgga

SEQ ID NO: 30147 - DNA, 21 bp, Artificial Sequence
  source: /note="Description of Artificial Sequence: Synthetic oligonucleotide"
gaagacccactcggacaaatg

SEQ ID NO: 30148 - DNA, 21 bp, Artificial Sequence
  source: /note="Description of Artificial Sequence: Synthetic oligonucleotide"
gaagacagccacttcgcacca

SEQ ID NO: 30149 - DNA, 21 bp, Artificial Sequence
  source: /note="Description of Artificial Sequence: Synthetic oligonucleotide"
gaagaagcaatgtacccattc

SEQ ID NO: 30150 - DNA, 21 bp, Artificial Sequence
  source: /note="Description of Artificial Sequence: Synthetic oligonucleotide"
gaagaagcaagcctcagcctc

SEQ ID NO: 30151 - DNA, 21 bp, Artificial Sequence
  source: /note="Description of Artificial Sequence: Synthetic oligonucleotide"
gaagaactcgcaaaagcagac

SEQ ID NO: 30152 - DNA, 21 bp, Artificial Sequence
  source: /note="Description of Artificial Sequence: Synthetic oligonucleotide"
gaagaactcagaagacacgtc

SEQ ID NO: 30153 - DNA, 21 bp, Artificial Sequence
  source: /note="Description of Artificial Sequence: Synthetic oligonucleotide"
gaagaaaacctccaaagaaca

SEQ ID NO: 30154 - DNA, 21 bp, Artificial Sequence
  source: /note="Description of Artificial Sequence: Synthetic oligonucleotide"
gaagaaagcggaagagtcgca

SEQ ID NO: 30155 - DNA, 21 bp, Artificial Sequence
  source: /note="Description of Artificial Sequence: Synthetic oligonucleotide"
gaagaaagcaaaagaagcgca

SEQ ID NO: 30156 - DNA, 21 bp, Artificial Sequence
  source: /note="Description of Artificial Sequence: Synthetic oligonucleotide"
gaagaaagcccagaaagcatc

SEQ ID NO: 30157 - DNA, 21 bp, Artificial Sequence
  source: /note="Description of Artificial Sequence: Synthetic oligonucleotide"
gaagaaacaagaaaaccactc

SEQ ID NO: 30158 - DNA, 21 bp, Artificial Sequence
  source: /note="Description of Artificial Sequence: Synthetic oligonucleotide"
gaagaaacatggcacagactc

SEQ ID NO: 30159 - DNA, 21 bp, Artificial Sequence
  source: /note="Description of Artificial Sequence: Synthetic oligonucleotide"
gaagaatacgtcgaaagaatc

SEQ ID NO: 30160 - DNA, 21 bp, Artificial Sequence
  source: /note="Description of Artificial Sequence: Synthetic oligonucleotide"
gaattcgaccaaagaaacatc

SEQ ID NO: 30161 - DNA, 21 bp, Artificial Sequence
  source: /note="Description of Artificial Sequence: Synthetic oligonucleotide"
gaattcgaaagaagaacaaca

SEQ ID NO: 30162 - DNA, 21 bp, Artificial Sequence
  source: /note="Description of Artificial Sequence: Synthetic oligonucleotide"
gaattcgaagtctgctgcgca

SEQ ID NO: 30163 - DNA, 21 bp, Artificial Sequence
  source: /note="Description of Artificial Sequence: Synthetic oligonucleotide"
gaattcggaatgacagtccca

SEQ ID NO: 30164 - DNA, 21 bp, Artificial Sequence
  source: /note="Description of Artificial Sequence: Synthetic oligonucleotide"
gaattcatcgaaatgagacca

SEQ ID NO: 30165 - DNA, 21 bp, Artificial Sequence
  source: /note="Description of Artificial Sequence: Synthetic oligonucleotide"
gaattcaacggaaaaaacgac

SEQ ID NO: 30166 - DNA, 21 bp, Artificial Sequence
  source: /note="Description of Artificial Sequence: Synthetic oligonucleotide"
gaattcaacaaaagcggagca

SEQ ID NO: 30167 - DNA, 21 bp, Artificial Sequence
  source: /note="Description of Artificial Sequence: Synthetic oligonucleotide"
gaattcaacccagcactcagc

SEQ ID NO: 30168 - DNA, 21 bp, Artificial Sequence
  source: /note="Description of Artificial Sequence: Synthetic oligonucleotide"
gaattcccaagcctcgacgac

SEQ ID NO: 30169 - DNA, 21 bp, Artificial Sequence
  source: /note="Description of Artificial Sequence: Synthetic oligonucleotide"
gaattcccaacaagcctccca

SEQ ID NO: 30170 - DNA, 21 bp, Artificial Sequence
  source: /note="Description of Artificial Sequence: Synthetic oligonucleotide"
gaattccaaaaaaaaagcagc

SEQ ID NO: 30171 - DNA, 21 bp, Artificial Sequence
  source: /note="Description of Artificial Sequence: Synthetic oligonucleotide"
gaattccaaagcctccacgtc

SEQ ID NO: 30172 - DNA, 21 bp, Artificial Sequence
  source: /note="Description of Artificial Sequence: Synthetic oligonucleotide"
gaattcagactcagcgcagtc

SEQ ID NO: 30173 - DNA, 21 bp, Artificial Sequence
  source: /note="Description of Artificial Sequence: Synthetic oligonucleotide"
gaattcagaagcacaggaaca

SEQ ID NO: 30174 - DNA, 21 bp, Artificial Sequence
  source: /note="Description of Artificial Sequence: Synthetic oligonucleotide"
gaattcagccaaatgacagaa

SEQ ID NO: 30175 - DNA, 21 bp, Artificial Sequence
  source: /note="Description of Artificial Sequence: Synthetic oligonucleotide"
gaattcagcagaatgaacaca

SEQ ID NO: 30176 - DNA, 21 bp, Artificial Sequence
  source: /note="Description of Artificial Sequence: Synthetic oligonucleotide"
gaattcagcacaagcctcagc

SEQ ID NO: 30177 - DNA, 21 bp, Artificial Sequence
  source: /note="Description of Artificial Sequence: Synthetic oligonucleotide"
gaattcacacacaacaaagca

SEQ ID NO: 30178 - DNA, 21 bp, Artificial Sequence
  source: /note="Description of Artificial Sequence: Synthetic oligonucleotide"
gaattcacaagcgaagacctc

SEQ ID NO: 30179 - DNA, 21 bp, Artificial Sequence
  source: /note="Description of Artificial Sequence: Synthetic oligonucleotide"
gaattcgtcctcagcctcagc

SEQ ID NO: 30180 - DNA, 21 bp, Artificial Sequence
  source: /note="Description of Artificial Sequence: Synthetic oligonucleotide"
gaattctacaaagactgggac

SEQ ID NO: 30181 - DNA, 21 bp, Artificial Sequence
  source: /note="Description of Artificial Sequence: Synthetic oligonucleotide"
gaaggagcaaacgcagcaaca

SEQ ID NO: 30182 - DNA, 21 bp, Artificial Sequence
  source: /note="Description of Artificial Sequence: Synthetic oligonucleotide"
gaaggagacttcgtcagagca

SEQ ID NO: 30183 - DNA, 21 bp, Artificial Sequence
  source: /note="Description of Artificial Sequence: Synthetic oligonucleotide"
gaaggagacaacagactcttc

SEQ ID NO: 30184 - DNA, 21 bp, Artificial Sequence
  source: /note="Description of Artificial Sequence: Synthetic oligonucleotide"
gaaggagaaaaccaaacaaca

SEQ ID NO: 30185 - DNA, 21 bp, Artificial Sequence
  source: /note="Description of Artificial Sequence: Synthetic oligonucleotide"
gaaggattcgtcggaccagaa

SEQ ID NO: 30186 - DNA, 21 bp, Artificial Sequence
  source: /note="Description of Artificial Sequence: Synthetic oligonucleotide"
gaaggaggacacagactcatc

SEQ ID NO: 30187 - DNA, 21 bp, Artificial Sequence
  source: /note="Description of Artificial Sequence: Synthetic oligonucleotide"
gaaggacacgacacactcatg

SEQ ID NO: 30188 - DNA, 21 bp, Artificial Sequence
  source: /note="Description of Artificial Sequence: Synthetic oligonucleotide"
gaaggaatcctcaaaagcctc

SEQ ID NO: 30189 - DNA, 21 bp, Artificial Sequence
  source: /note="Description of Artificial Sequence: Synthetic oligonucleotide"
gaaggaatcccaccattcagc

SEQ ID NO: 30190 - DNA, 21 bp, Artificial Sequence
  source: /note="Description of Artificial Sequence: Synthetic oligonucleotide"
gaaggaatcagcgcaagcgtc

SEQ ID NO: 30191 - DNA, 21 bp, Artificial Sequence
  source: /note="Description of Artificial Sequence: Synthetic oligonucleotide"
gaaggaaaagtcagactccca

SEQ ID NO: 30192 - DNA, 21 bp, Artificial Sequence
  source: /note="Description of Artificial Sequence: Synthetic oligonucleotide"
gaaggactcggactcagagtc

SEQ ID NO: 30193 - DNA, 21 bp, Artificial Sequence
  source: /note="Description of Artificial Sequence: Synthetic oligonucleotide"
gaaggaatgccactcaaccac

SEQ ID NO: 30194 - DNA, 21 bp, Artificial Sequence
  source: /note="Description of Artificial Sequence: Synthetic oligonucleotide"
gaaggaccagtcctcctcgca

SEQ ID NO: 30195 - DNA, 21 bp, Artificial Sequence
  source: /note="Description of Artificial Sequence: Synthetic oligonucleotide"
gaaggaagaagagaaccatac

SEQ ID NO: 30196 - DNA, 21 bp, Artificial Sequence
  source: /note="Description of Artificial Sequence: Synthetic oligonucleotide"
gaaggaagagtcgtcccagca

SEQ ID NO: 30197 - DNA, 21 bp, Artificial Sequence
  source: /note="Description of Artificial Sequence: Synthetic oligonucleotide"
gaaggaagcttcccactccac

SEQ ID NO: 30198 - DNA, 21 bp, Artificial Sequence
  source: /note="Description of Artificial Sequence: Synthetic oligonucleotide"
gaaggaagcggaatgctcaga

SEQ ID NO: 30199 - DNA, 21 bp, Artificial Sequence
  source: /note="Description of Artificial Sequence: Synthetic oligonucleotide"
gaaggaagcaaaatgatggtc

SEQ ID NO: 30200 - DNA, 21 bp, Artificial Sequence
  source: /note="Description of Artificial Sequence: Synthetic oligonucleotide"
gaaggaagcccagacctcaga

SEQ ID NO: 30201 - DNA, 21 bp, Artificial Sequence
  source: /note="Description of Artificial Sequence: Synthetic oligonucleotide"
gaaggaagcccaagagcaatg

SEQ ID NO: 30202 - DNA, 21 bp, Artificial Sequence
  source: /note="Description of Artificial Sequence: Synthetic oligonucleotide"
gaaggaagccaaaacgacttc

SEQ ID NO: 30203 - DNA, 21 bp, Artificial Sequence
  source: /note="Description of Artificial Sequence: Synthetic oligonucleotide"
gaaggaacagcaagactctac

SEQ ID NO: 30204 - DNA, 21 bp, Artificial Sequence
  source: /note="Description of Artificial Sequence: Synthetic oligonucleotide"
gaaggagtcgtcacactccaa

SEQ ID NO: 30205 - DNA, 21 bp, Artificial Sequence
  source: /note="Description of Artificial Sequence: Synthetic oligonucleotide"
gaaggatacgacagcacaaca

SEQ ID NO: 30206 - DNA, 21 bp, Artificial Sequence
  source: /note="Description of Artificial Sequence: Synthetic oligonucleotide"
gaaggatacgaaaacggagca

SEQ ID NO: 30207 - DNA, 21 bp, Artificial Sequence
  source: /note="Description of Artificial Sequence: Synthetic oligonucleotide"
gaacactgcacaaacacatgc

SEQ ID NO: 30208 - DNA, 21 bp, Artificial Sequence
  source: /note="Description of Artificial Sequence: Synthetic oligonucleotide"
gaacacggaatcgcaatggac

SEQ ID NO: 30209 - DNA, 21 bp, Artificial Sequence
  source: /note="Description of Artificial Sequence: Synthetic oligonucleotide"
gaacacggactcaacacactc

SEQ ID NO: 30210 - DNA, 21 bp, Artificial Sequence
  source: /note="Description of Artificial Sequence: Synthetic oligonucleotide"
gaacacggaccagcactcctc

SEQ ID NO: 30211 - DNA, 21 bp, Artificial Sequence
  source: /note="Description of Artificial Sequence: Synthetic oligonucleotide"
gaacacggaagcgcaatgaaa

SEQ ID NO: 30212 - DNA, 21 bp, Artificial Sequence
  source: /note="Description of Artificial Sequence: Synthetic oligonucleotide"
gaacaccacgtccacagccca

SEQ ID NO: 30213 - DNA, 21 bp, Artificial Sequence
  source: /note="Description of Artificial Sequence: Synthetic oligonucleotide"
gaacacatcccacaagcaatg

SEQ ID NO: 30214 - DNA, 21 bp, Artificial Sequence
  source: /note="Description of Artificial Sequence: Synthetic oligonucleotide"
gaacacaaaggagcacacttc

SEQ ID NO: 30215 - DNA, 21 bp, Artificial Sequence
  source: /note="Description of Artificial Sequence: Synthetic oligonucleotide"
gaacacaaactcctcgtcatg

SEQ ID NO: 30216 - DNA, 21 bp, Artificial Sequence
  source: /note="Description of Artificial Sequence: Synthetic oligonucleotide"
gaacacatgccaagcctcaga

SEQ ID NO: 30217 - DNA, 21 bp, Artificial Sequence
  source: /note="Description of Artificial Sequence: Synthetic oligonucleotide"
gaacacaacgtcggacaaagc

SEQ ID NO: 30218 - DNA, 21 bp, Artificial Sequence
  source: /note="Description of Artificial Sequence: Synthetic oligonucleotide"
gaacaccaaggaacaacaatc

SEQ ID NO: 30219 - DNA, 21 bp, Artificial Sequence
  source: /note="Description of Artificial Sequence: Synthetic oligonucleotide"
gaacacagcgactaccaagtc

SEQ ID NO: 30220 - DNA, 21 bp, Artificial Sequence
  source: /note="Description of Artificial Sequence: Synthetic oligonucleotide"
gaacacagcgaactcacacca

SEQ ID NO: 30221 - DNA, 21 bp, Artificial Sequence
  source: /note="Description of Artificial Sequence: Synthetic oligonucleotide"
gaacacagcttcaaaagcgca

SEQ ID NO: 30222 - DNA, 21 bp, Artificial Sequence
  source: /note="Description of Artificial Sequence: Synthetic oligonucleotide"
gaacacagcggaacagcaatc

SEQ ID NO: 30223 - DNA, 21 bp, Artificial Sequence
  source: /note="Description of Artificial Sequence: Synthetic oligonucleotide"
gaacacagcagcggaatgctc

SEQ ID NO: 30224 - DNA, 21 bp, Artificial Sequence
  source: /note="Description of Artificial Sequence: Synthetic oligonucleotide"
gaaatcgcaagaggaagcttc

SEQ ID NO: 30225 - DNA, 21 bp, Artificial Sequence
  source: /note="Description of Artificial Sequence: Synthetic oligonucleotide"
gaaatcggatacatgagcgca

SEQ ID NO: 30226 - DNA, 21 bp, Artificial Sequence
  source: /note="Description of Artificial Sequence: Synthetic oligonucleotide"
gaaatccactacccactcgaa

SEQ ID NO: 30227 - DNA, 21 bp, Artificial Sequence
  source: /note="Description of Artificial Sequence: Synthetic oligonucleotide"
gaaatcaaagcacaaatgagc

SEQ ID NO: 30228 - DNA, 21 bp, Artificial Sequence
  source: /note="Description of Artificial Sequence: Synthetic oligonucleotide"
gaaatcaaagacgaaaaactc

SEQ ID NO: 30229 - DNA, 21 bp, Artificial Sequence
  source: /note="Description of Artificial Sequence: Synthetic oligonucleotide"
gaaatcaaacacagcatgcac

SEQ ID NO: 30230 - DNA, 21 bp, Artificial Sequence
  source: /note="Description of Artificial Sequence: Synthetic oligonucleotide"
gaaatcaacagccaaacaaac

SEQ ID NO: 30231 - DNA, 21 bp, Artificial Sequence
  source: /note="Description of Artificial Sequence: Synthetic oligonucleotide"
gaaatccaacactaccacgga

SEQ ID NO: 30232 - DNA, 21 bp, Artificial Sequence
  source: /note="Description of Artificial Sequence: Synthetic oligonucleotide"
gaaatcagaaaaagcatcatc

SEQ ID NO: 30233 - DNA, 21 bp, Artificial Sequence
  source: /note="Description of Artificial Sequence: Synthetic oligonucleotide"
gaaatcagcacacaaagatac

SEQ ID NO: 30234 - DNA, 21 bp, Artificial Sequence
  source: /note="Description of Artificial Sequence: Synthetic oligonucleotide"
gaaaaagcaagagcagcaagc

SEQ ID NO: 30235 - DNA, 21 bp, Artificial Sequence
  source: /note="Description of Artificial Sequence: Synthetic oligonucleotide"
gaaaaagaaagaccaatgctc

SEQ ID NO: 30236 - DNA, 21 bp, Artificial Sequence
  source: /note="Description of Artificial Sequence: Synthetic oligonucleotide"
gaaaaaggattcctccacagc

SEQ ID NO: 30237 - DNA, 21 bp, Artificial Sequence
  source: /note="Description of Artificial Sequence: Synthetic oligonucleotide"
gaaaaaggactcagcacacaa

SEQ ID NO: 30238 - DNA, 21 bp, Artificial Sequence
  source: /note="Description of Artificial Sequence: Synthetic oligonucleotide"
gaaaaaggaagcatcatgcca

SEQ ID NO: 30239 - DNA, 21 bp, Artificial Sequence
  source: /note="Description of Artificial Sequence: Synthetic oligonucleotide"
gaaaaaggaagcctcggacac

SEQ ID NO: 30240 - DNA, 21 bp, Artificial Sequence
  source: /note="Description of Artificial Sequence: Synthetic oligonucleotide"
gaaaaaatcgacagactcgga

SEQ ID NO: 30241 - DNA, 21 bp, Artificial Sequence
  source: /note="Description of Artificial Sequence: Synthetic oligonucleotide"
gaaaaaatcaaaatctacagc

SEQ ID NO: 30242 - DNA, 21 bp, Artificial Sequence
  source: /note="Description of Artificial Sequence: Synthetic oligonucleotide"
gaaaaaatcccacacagcagc

SEQ ID NO: 30243 - DNA, 21 bp, Artificial Sequence
  source: /note="Description of Artificial Sequence: Synthetic oligonucleotide"
gaaaaaaaactcagcgcagaa

SEQ ID NO: 30244 - DNA, 21 bp, Artificial Sequence
  source: /note="Description of Artificial Sequence: Synthetic oligonucleotide"
gaaaaactcgcaagaacagga

SEQ ID NO: 30245 - DNA, 21 bp, Artificial Sequence
  source: /note="Description of Artificial Sequence: Synthetic oligonucleotide"
gaaaaaatgcacgcaaaccca

SEQ ID NO: 30246 - DNA, 21 bp, Artificial Sequence
  source: /note="Description of Artificial Sequence: Synthetic oligonucleotide"
gaaaaaccatacatcacaatg

SEQ ID NO: 30247 - DNA, 21 bp, Artificial Sequence
  source: /note="Description of Artificial Sequence: Synthetic oligonucleotide"
gaaaaacaaaacctcccactc

SEQ ID NO: 30248 - DNA, 21 bp, Artificial Sequence
  source: /note="Description of Artificial Sequence: Synthetic oligonucleotide"
gaaaaagtcatcagaccagtc

SEQ ID NO: 30249 - DNA, 21 bp, Artificial Sequence
  source: /note="Description of Artificial Sequence: Synthetic oligonucleotide"
gaaaaagtcccaaaactcctc

SEQ ID NO: 30250 - DNA, 21 bp, Artificial Sequence
  source: /note="Description of Artificial Sequence: Synthetic oligonucleotide"
gaactcgcagcagaagcaaga

SEQ ID NO: 30251 - DNA, 21 bp, Artificial Sequence
  source: /note="Description of Artificial Sequence: Synthetic oligonucleotide"
gaactcgaaagcgcagaaatc

SEQ ID NO: 30252 - DNA, 21 bp, Artificial Sequence
  source: /note="Description of Artificial Sequence: Synthetic oligonucleotide"
gaactcgaaacagcaaaactc

SEQ ID NO: 30253 - DNA, 21 bp, Artificial Sequence
  source: /note="Description of Artificial Sequence: Synthetic oligonucleotide"
gaactcttcagcgacaaattc

SEQ ID NO: 30254 - DNA, 21 bp, Artificial Sequence
  source: /note="Description of Artificial Sequence: Synthetic oligonucleotide"
gaactcggaccaccaagagca

SEQ ID NO: 30255 - DNA, 21 bp, Artificial Sequence
  source: /note="Description of Artificial Sequence: Synthetic oligonucleotide"
gaactcggaccaagaacaagc

SEQ ID NO: 30256 - DNA, 21 bp, Artificial Sequence
  source: /note="Description of Artificial Sequence: Synthetic oligonucleotide"
gaactcatcctcaacagcagc

SEQ ID NO: 30257 - DNA, 21 bp, Artificial Sequence
  source: /note="Description of Artificial Sequence: Synthetic oligonucleotide"
gaactcaaagcagtcgcaaga

SEQ ID NO: 30258 - DNA, 21 bp, Artificial Sequence
  source: /note="Description of Artificial Sequence: Synthetic oligonucleotide"
gaactcaaattcccagacaaa

SEQ ID NO: 30259 - DNA, 21 bp, Artificial Sequence
  source: /note="Description of Artificial Sequence: Synthetic oligonucleotide"
gaactcaaacaagcaagcgga

SEQ ID NO: 30260 - DNA, 21 bp, Artificial Sequence
  source: /note="Description of Artificial Sequence: Synthetic oligonucleotide"
gaactcaaaagatacgtcgga

SEQ ID NO: 30261 - DNA, 21 bp, Artificial Sequence
  source: /note="Description of Artificial Sequence: Synthetic oligonucleotide"
gaactcctcgaaccagacgac

SEQ ID NO: 30262 - DNA, 21 bp, Artificial Sequence
  source: /note="Description of Artificial Sequence: Synthetic oligonucleotide"
gaactcatggtcaacggagga

SEQ ID NO: 30263 - DNA, 21 bp, Artificial Sequence
  source: /note="Description of Artificial Sequence: Synthetic oligonucleotide"
gaactcaacaacctcctcaga

SEQ ID NO: 30264 - DNA, 21 bp, Artificial Sequence
  source: /note="Description of Artificial Sequence: Synthetic oligonucleotide"
gaactcaacgtccacagagga

SEQ ID NO: 30265 - DNA, 21 bp, Artificial Sequence
  source: /note="Description of Artificial Sequence: Synthetic oligonucleotide"
gaactcccagcaaaaagcatg

SEQ ID NO: 30266 - DNA, 21 bp, Artificial Sequence
  source: /note="Description of Artificial Sequence: Synthetic oligonucleotide"
gaactcccagcaacatacgga

SEQ ID NO: 30267 - DNA, 21 bp, Artificial Sequence
  source: /note="Description of Artificial Sequence: Synthetic oligonucleotide"
gaactcccaggaacaccatgc

SEQ ID NO: 30268 - DNA, 21 bp, Artificial Sequence
  source: /note="Description of Artificial Sequence: Synthetic oligonucleotide"
gaactcccactcgactgggac

SEQ ID NO: 30269 - DNA, 21 bp, Artificial Sequence
  source: /note="Description of Artificial Sequence: Synthetic oligonucleotide"
gaactcccaagcaaacaagga

SEQ ID NO: 30270 - DNA, 21 bp, Artificial Sequence
  source: /note="Description of Artificial Sequence: Synthetic oligonucleotide"
gaactccaaggaagaatcaac

SEQ ID NO: 30271 - DNA, 21 bp, Artificial Sequence
  source: /note="Description of Artificial Sequence: Synthetic oligonucleotide"
gaactccaactcccaaaaagc

SEQ ID NO: 30272 - DNA, 21 bp, Artificial Sequence
  source: /note="Description of Artificial Sequence: Synthetic oligonucleotide"
gaactccaagtccaaatggca

SEQ ID NO: 30273 - DNA, 21 bp, Artificial Sequence
  source: /note="Description of Artificial Sequence: Synthetic oligonucleotide"
gaactcagaggaagcgtcaac

SEQ ID NO: 30274 - DNA, 21 bp, Artificial Sequence
  source: /note="Description of Artificial Sequence: Synthetic oligonucleotide"
gaactcagagtcgtccacagc

SEQ ID NO: 30275 - DNA, 21 bp, Artificial Sequence
  source: /note="Description of Artificial Sequence: Synthetic oligonucleotide"
gaactcagcgcaagagcaaca

SEQ ID NO: 30276 - DNA, 21 bp, Artificial Sequence
  source: /note="Description of Artificial Sequence: Synthetic oligonucleotide"
gaactcagcgacggaagcgga

SEQ ID NO: 30277 - DNA, 21 bp, Artificial Sequence
  source: /note="Description of Artificial Sequence: Synthetic oligonucleotide"
gaactcagcttccaattcgac

SEQ ID NO: 30278 - DNA, 21 bp, Artificial Sequence
  source: /note="Description of Artificial Sequence: Synthetic oligonucleotide"
gaactcagcatgggaagctac

SEQ ID NO: 30279 - DNA, 21 bp, Artificial Sequence
  source: /note="Description of Artificial Sequence: Synthetic oligonucleotide"
gaactcagcagaaacaacgtc

SEQ ID NO: 30280 - DNA, 21 bp, Artificial Sequence
  source: /note="Description of Artificial Sequence: Synthetic oligonucleotide"
gaactcagcgtcaacggactc

SEQ ID NO: 30281 - DNA, 21 bp, Artificial Sequence
  source: /note="Description of Artificial Sequence: Synthetic oligonucleotide"
gaactcagctacagaccaaca

SEQ ID NO: 30282 - DNA, 21 bp, Artificial Sequence
  source: /note="Description of Artificial Sequence: Synthetic oligonucleotide"
gaactcacaacaggaaaaagc

SEQ ID NO: 30283 - DNA, 21 bp, Artificial Sequence
  source: /note="Description of Artificial Sequence: Synthetic oligonucleotide"
gaactcacagtcagactcgca

SEQ ID NO: 30284 - DNA, 21 bp, Artificial Sequence
  source: /note="Description of Artificial Sequence: Synthetic oligonucleotide"
gaactcacatacccaggaaga

SEQ ID NO: 30285 - DNA, 21 bp, Artificial Sequence
  source: /note="Description of Artificial Sequence: Synthetic oligonucleotide"
gaactcgtcatgagcgtcaga

SEQ ID NO: 30286 - DNA, 21 bp, Artificial Sequence
  source: /note="Description of Artificial Sequence: Synthetic oligonucleotide"
gaactctacagcagaccagca

SEQ ID NO: 30287 - DNA, 21 bp, Artificial Sequence
  source: /note="Description of Artificial Sequence: Synthetic oligonucleotide"
gaaatggcagcacacctcgaa

SEQ ID NO: 30288 - DNA, 21 bp, Artificial Sequence
  source: /note="Description of Artificial Sequence: Synthetic oligonucleotide"
gaaatggcaccatacagcaaa

SEQ ID NO: 30289 - DNA, 21 bp, Artificial Sequence
  source: /note="Description of Artificial Sequence: Synthetic oligonucleotide"
gaaatggacggaaacgcatac

SEQ ID NO: 30290 - DNA, 21 bp, Artificial Sequence
  source: /note="Description of Artificial Sequence: Synthetic oligonucleotide"
gaaatggaaatgctcagcgac

SEQ ID NO: 30291 - DNA, 21 bp, Artificial Sequence
  source: /note="Description of Artificial Sequence: Synthetic oligonucleotide"
gaaatgggacaactcccagac

SEQ ID NO: 30292 - DNA, 21 bp, Artificial Sequence
  source: /note="Description of Artificial Sequence: Synthetic oligonucleotide"
gaaatgggacaaacactcgaa

SEQ ID NO: 30293 - DNA, 21 bp, Artificial Sequence
  source: /note="Description of Artificial Sequence: Synthetic oligonucleotide"
gaaatgcacgaagacgaaaaa

SEQ ID NO: 30294 - DNA, 21 bp, Artificial Sequence
  source: /note="Description of Artificial Sequence: Synthetic oligonucleotide"
gaaatgctcgaaagattcgac

SEQ ID NO: 30295 - DNA, 21 bp, Artificial Sequence
  source: /note="Description of Artificial Sequence: Synthetic oligonucleotide"
gaaatgctcagagcaggattc

SEQ ID NO: 30296 - DNA, 21 bp, Artificial Sequence
  source: /note="Description of Artificial Sequence: Synthetic oligonucleotide"
gaaatgatggcaaacagcaca

SEQ ID NO: 30297 - DNA, 21 bp, Artificial Sequence
  source: /note="Description of Artificial Sequence: Synthetic oligonucleotide"
gaaatgccaaaaacaccaaaa

SEQ ID NO: 30298 - DNA, 21 bp, Artificial Sequence
  source: /note="Description of Artificial Sequence: Synthetic oligonucleotide"
gaaatgccaacaagacaacca

SEQ ID NO: 30299 - DNA, 21 bp, Artificial Sequence
  source: /note="Description of Artificial Sequence: Synthetic oligonucleotide"
gaaatgccaacatacaacgac

SEQ ID NO: 30300 - DNA, 21 bp, Artificial Sequence
  source: /note="Description of Artificial Sequence: Synthetic oligonucleotide"
gaaatgagacaacaaagcatc

SEQ ID NO: 30301 - DNA, 21 bp, Artificial Sequence
  source: /note="Description of Artificial Sequence: Synthetic oligonucleotide"
gaaatgagaagcagcacaagc

SEQ ID NO: 30302 - DNA, 21 bp, Artificial Sequence
  source: /note="Description of Artificial Sequence: Synthetic oligonucleotide"
gaaatgacacaactcccagca

SEQ ID NO: 30303 - DNA, 21 bp, Artificial Sequence
  source: /note="Description of Artificial Sequence: Synthetic oligonucleotide"
gaaatgtacctcacaagagtc

SEQ ID NO: 30304 - DNA, 21 bp, Artificial Sequence
  source: /note="Description of Artificial Sequence: Synthetic oligonucleotide"
gaaaacgcagtcccaggagtc

SEQ ID NO: 30305 - DNA, 21 bp, Artificial Sequence
  source: /note="Description of Artificial Sequence: Synthetic oligonucleotide"
gaaaacgacagaagcagcaca

SEQ ID NO: 30306 - DNA, 21 bp, Artificial Sequence
  source: /note="Description of Artificial Sequence: Synthetic oligonucleotide"
gaaaacgaaggaacaggaaca

SEQ ID NO: 30307 - DNA, 21 bp, Artificial Sequence
  source: /note="Description of Artificial Sequence: Synthetic oligonucleotide"
gaaaacgaaagccaccacctc

SEQ ID NO: 30308 - DNA, 21 bp, Artificial Sequence
  source: /note="Description of Artificial Sequence: Synthetic oligonucleotide"
gaaaacggacacagcttcaca

SEQ ID NO: 30309 - DNA, 21 bp, Artificial Sequence
  source: /note="Description of Artificial Sequence: Synthetic oligonucleotide"
gaaaacggaagaacagaaatc

SEQ ID NO: 30310 - DNA, 21 bp, Artificial Sequence
  source: /note="Description of Artificial Sequence: Synthetic oligonucleotide"
gaaaacaaaccaggaagccca

SEQ ID NO: 30311 - DNA, 21 bp, Artificial Sequence
  source: /note="Description of Artificial Sequence: Synthetic oligonucleotide"
gaaaacatggcatacctcagc

SEQ ID NO: 30312 - DNA, 21 bp, Artificial Sequence
  source: /note="Description of Artificial Sequence: Synthetic oligonucleotide"
gaaaacccaggaagcgcaagc

SEQ ID NO: 30313 - DNA, 21 bp, Artificial Sequence
  source: /note="Description of Artificial Sequence: Synthetic oligonucleotide"
gaaaacccaccaagagaacca

SEQ ID NO: 30314 - DNA, 21 bp, Artificial Sequence
  source: /note="Description of Artificial Sequence: Synthetic oligonucleotide"
gaaaacccaagaggaagcgtc

SEQ ID NO: 30315 - DNA, 21 bp, Artificial Sequence
  source: /note="Description of Artificial Sequence: Synthetic oligonucleotide"
gaaaacccaacaatgtacagc

SEQ ID NO: 30316 - DNA, 21 bp, Artificial Sequence
  source: /note="Description of Artificial Sequence: Synthetic oligonucleotide"
gaaaaccaataccaagacagc

SEQ ID NO: 30317 - DNA, 21 bp, Artificial Sequence
  source: /note="Description of Artificial Sequence: Synthetic oligonucleotide"
gaaaacagactcaaaaacttc

SEQ ID NO: 30318 - DNA, 21 bp, Artificial Sequence
  source: /note="Description of Artificial Sequence: Synthetic oligonucleotide"
gaaaacagaagcggagaagac

SEQ ID NO: 30319 - DNA, 21 bp, Artificial Sequence
  source: /note="Description of Artificial Sequence: Synthetic oligonucleotide"
gaaaacagcagcctcgtcgac

SEQ ID NO: 30320 - DNA, 21 bp, Artificial Sequence
  source: /note="Description of Artificial Sequence: Synthetic oligonucleotide"
gaaaacacattcagcagcaga

SEQ ID NO: 30321 - DNA, 21 bp, Artificial Sequence
  source: /note="Description of Artificial Sequence: Synthetic oligonucleotide"
gaaaacacaatcacaagcctc

SEQ ID NO: 30322 - DNA, 21 bp, Artificial Sequence
  source: /note="Description of Artificial Sequence: Synthetic oligonucleotide"
gaaaacacactcagactcgac

SEQ ID NO: 30323 - DNA, 21 bp, Artificial Sequence
  source: /note="Description of Artificial Sequence: Synthetic oligonucleotide"
gaaaacgtcaaaccaggatgg

SEQ ID NO: 30324 - DNA, 21 bp, Artificial Sequence
  source: /note="Description of Artificial Sequence: Synthetic oligonucleotide"
gaaccagcagcaagagcagtc

SEQ ID NO: 30325 - DNA, 21 bp, Artificial Sequence
  source: /note="Description of Artificial Sequence: Synthetic oligonucleotide"
gaaccagcagacagaacacaa

SEQ ID NO: 30326 - DNA, 21 bp, Artificial Sequence
  source: /note="Description of Artificial Sequence: Synthetic oligonucleotide"
gaaccagcaggaccaagactc

SEQ ID NO: 30327 - DNA, 21 bp, Artificial Sequence
  source: /note="Description of Artificial Sequence: Synthetic oligonucleotide"
gaaccagcactcccatacgca

SEQ ID NO: 30328 - DNA, 21 bp, Artificial Sequence
  source: /note="Description of Artificial Sequence: Synthetic oligonucleotide"
gaaccagcaacaggaagcagc

SEQ ID NO: 30329 - DNA, 21 bp, Artificial Sequence
  source: /note="Description of Artificial Sequence: Synthetic oligonucleotide"
gaaccagacagcgcatacagc

SEQ ID NO: 30330 - DNA, 21 bp, Artificial Sequence
  source: /note="Description of Artificial Sequence: Synthetic oligonucleotide"
gaaccattcgacgcaaaaaca

SEQ ID NO: 30331 - DNA, 21 bp, Artificial Sequence
  source: /note="Description of Artificial Sequence: Synthetic oligonucleotide"
gaaccattcagcaacagccca

SEQ ID NO: 30332 - DNA, 21 bp, Artificial Sequence
  source: /note="Description of Artificial Sequence: Synthetic oligonucleotide"
gaaccaggaggaaaccacctc

SEQ ID NO: 30333 - DNA, 21 bp, Artificial Sequence
  source: /note="Description of Artificial Sequence: Synthetic oligonucleotide"
gaaccaggacacgcaagagca

SEQ ID NO: 30334 - DNA, 21 bp, Artificial Sequence
  source: /note="Description of Artificial Sequence: Synthetic oligonucleotide"
gaaccaggaagaacaggattc

SEQ ID NO: 30335 - DNA, 21 bp, Artificial Sequence
  source: /note="Description of Artificial Sequence: Synthetic oligonucleotide"
gaaccaggagtcgtcggatgc

SEQ ID NO: 30336 - DNA, 21 bp, Artificial Sequence
  source: /note="Description of Artificial Sequence: Synthetic oligonucleotide"
gaaccacacgcaccagaaaga

SEQ ID NO: 30337 - DNA, 21 bp, Artificial Sequence
  source: /note="Description of Artificial Sequence: Synthetic oligonucleotide"
gaaccacacgtcccaggagca

SEQ ID NO: 30338 - DNA, 21 bp, Artificial Sequence
  source: /note="Description of Artificial Sequence: Synthetic oligonucleotide"
gaaccaaaacaccaattcagc

SEQ ID NO: 30339 - DNA, 21 bp, Artificial Sequence
  source: /note="Description of Artificial Sequence: Synthetic oligonucleotide"
gaaccaaaaagaggatggagc

SEQ ID NO: 30340 - DNA, 21 bp, Artificial Sequence
  source: /note="Description of Artificial Sequence: Synthetic oligonucleotide"
gaaccaaaaagcgcaagcatc

SEQ ID NO: 30341 - DNA, 21 bp, Artificial Sequence
  source: /note="Description of Artificial Sequence: Synthetic oligonucleotide"
gaaccactcaacagcagcgga

SEQ ID NO: 30342 - DNA, 21 bp, Artificial Sequence
  source: /note="Description of Artificial Sequence: Synthetic oligonucleotide"
gaaccactcagcgcaaacaga

SEQ ID NO: 30343 - DNA, 21 bp, Artificial Sequence
  source: /note="Description of Artificial Sequence: Synthetic oligonucleotide"
gaaccaaacgcaacaagcgtc

SEQ ID NO: 30344 - DNA, 21 bp, Artificial Sequence
  source: /note="Description of Artificial Sequence: Synthetic oligonucleotide"
gaaccaaaccacccagtcagc

SEQ ID NO: 30345 - DNA, 21 bp, Artificial Sequence
  source: /note="Description of Artificial Sequence: Synthetic oligonucleotide"
gaaccaccaagcagcctcaaa

SEQ ID NO: 30346 - DNA, 21 bp, Artificial Sequence
  source: /note="Description of Artificial Sequence: Synthetic oligonucleotide"
gaaccacaaagaccactcaga

SEQ ID NO: 30347 - DNA, 21 bp, Artificial Sequence
  source: /note="Description of Artificial Sequence: Synthetic oligonucleotide"
gaaccaagcaacgaaagcgca

SEQ ID NO: 30348 - DNA, 21 bp, Artificial Sequence
  source: /note="Description of Artificial Sequence: Synthetic oligonucleotide"
gaaccaagcaacagccacgca

SEQ ID NO: 30349 - DNA, 21 bp, Artificial Sequence
  source: /note="Description of Artificial Sequence: Synthetic oligonucleotide"
gaaccaagctacctcccaagc

SEQ ID NO: 30350 - DNA, 21 bp, Artificial Sequence
  source: /note="Description of Artificial Sequence: Synthetic oligonucleotide"
gaaccaacagaaagaatcagc

SEQ ID NO: 30351 - DNA, 21 bp, Artificial Sequence
  source: /note="Description of Artificial Sequence: Synthetic oligonucleotide"
gaaccaacaatctacctcaca

SEQ ID NO: 30352 - DNA, 21 bp, Artificial Sequence
  source: /note="Description of Artificial Sequence: Synthetic oligonucleotide"
gaaccaacaatgagaagcatc

SEQ ID NO: 30353 - DNA, 21 bp, Artificial Sequence
  source: /note="Description of Artificial Sequence: Synthetic oligonucleotide"
gaaccaacaagaccagcaaca

SEQ ID NO: 30354 - DNA, 21 bp, Artificial Sequence
  source: /note="Description of Artificial Sequence: Synthetic oligonucleotide"
gaaccaacaagaagcagcagc

SEQ ID NO: 30355 - DNA, 21 bp, Artificial Sequence
  source: /note="Description of Artificial Sequence: Synthetic oligonucleotide"
gaaccaacaagaacaaaaatg

SEQ ID NO: 30356 - DNA, 21 bp, Artificial Sequence
  source: /note="Description of Artificial Sequence: Synthetic oligonucleotide"
gaaccagtcatcggattccca

SEQ ID NO: 30357 - DNA, 21 bp, Artificial Sequence
  source: /note="Description of Artificial Sequence: Synthetic oligonucleotide"
gaaccagtcagcacagcagca

SEQ ID NO: 30358 - DNA, 21 bp, Artificial Sequence
  source: /note="Description of Artificial Sequence: Synthetic oligonucleotide"
gaaccatacctcagcgcaaaa

SEQ ID NO: 30359 - DNA, 21 bp, Artificial Sequence
  source: /note="Description of Artificial Sequence: Synthetic oligonucleotide"
gaaccatacagcccagcaatc

SEQ ID NO: 30360 - DNA, 21 bp, Artificial Sequence
  source: /note="Description of Artificial Sequence: Synthetic oligonucleotide"
gaacaagcagcactcagcttc

SEQ ID NO: 30361 - DNA, 21 bp, Artificial Sequence
  source: /note="Description of Artificial Sequence: Synthetic oligonucleotide"
gaacaagcactcaaaccagaa

SEQ ID NO: 30362 - DNA, 21 bp, Artificial Sequence
  source: /note="Description of Artificial Sequence: Synthetic oligonucleotide"
gaacaagcaagactcgacgtc

SEQ ID NO: 30363 - DNA, 21 bp, Artificial Sequence
  source: /note="Description of Artificial Sequence: Synthetic oligonucleotide"
gaacaagcaagcttcaaaatc

SEQ ID NO: 30364 - DNA, 21 bp, Artificial Sequence
  source: /note="Description of Artificial Sequence: Synthetic oligonucleotide"
gaacaattcgcagcaccagtc

SEQ ID NO: 30365 - DNA, 21 bp, Artificial Sequence
  source: /note="Description of Artificial Sequence: Synthetic oligonucleotide"
gaacaaggaacaccaagcgca

SEQ ID NO: 30366 - DNA, 21 bp, Artificial Sequence
  source: /note="Description of Artificial Sequence: Synthetic oligonucleotide"
gaacaaaaaccactcacaaga

SEQ ID NO: 30367 - DNA, 21 bp, Artificial Sequence
  source: /note="Description of Artificial Sequence: Synthetic oligonucleotide"
gaacaactcaaagactacgaa

SEQ ID NO: 30368 - DNA, 21 bp, Artificial Sequence
  source: /note="Description of Artificial Sequence: Synthetic oligonucleotide"
gaacaaaacagcagaggactc

SEQ ID NO: 30369 - DNA, 21 bp, Artificial Sequence
  source: /note="Description of Artificial Sequence: Synthetic oligonucleotide"
gaacaaccaaaatacagcaaa

SEQ ID NO: 30370 - DNA, 21 bp, Artificial Sequence
  source: /note="Description of Artificial Sequence: Synthetic oligonucleotide"
gaacaacaatgcccaagaagc

SEQ ID NO: 30371 - DNA, 21 bp, Artificial Sequence
  source: /note="Description of Artificial Sequence: Synthetic oligonucleotide"
gaacaaagagacagaaacgga

SEQ ID NO: 30372 - DNA, 21 bp, Artificial Sequence
  source: /note="Description of Artificial Sequence: Synthetic oligonucleotide"
gaacaaagaggaacaatcctc

SEQ ID NO: 30373 - DNA, 21 bp, Artificial Sequence
  source: /note="Description of Artificial Sequence: Synthetic oligonucleotide"
gaacaaagactcagccaaagc

SEQ ID NO: 30374 - DNA, 21 bp, Artificial Sequence
  source: /note="Description of Artificial Sequence: Synthetic oligonucleotide"
gaacaaagaagaagcgaaaca

SEQ ID NO: 30375 - DNA, 21 bp, Artificial Sequence
  source: /note="Description of Artificial Sequence: Synthetic oligonucleotide"
gaacaaagctacagagacagc

SEQ ID NO: 30376 - DNA, 21 bp, Artificial Sequence
  source: /note="Description of Artificial Sequence: Synthetic oligonucleotide"
gaacaaacaggacacagagca

SEQ ID NO: 30377 - DNA, 21 bp, Artificial Sequence
  source: /note="Description of Artificial Sequence: Synthetic oligonucleotide"
gaacaatacagagacaacagc

SEQ ID NO: 30378 - DNA, 21 bp, Artificial Sequence
  source: /note="Description of Artificial Sequence: Synthetic oligonucleotide"
gaaagagcagcaggactcaga

SEQ ID NO: 30379 - DNA, 21 bp, Artificial Sequence
  source: /note="Description of Artificial Sequence: Synthetic oligonucleotide"
gaaagagcaggaccacacgac

SEQ ID NO: 30380 - DNA, 21 bp, Artificial Sequence
  source: /note="Description of Artificial Sequence: Synthetic oligonucleotide"
gaaagagcaccaccaggactc

SEQ ID NO: 30381 - DNA, 21 bp, Artificial Sequence
  source: /note="Description of Artificial Sequence: Synthetic oligonucleotide"
gaaagagacagcagaaaagca

SEQ ID NO: 30382 - DNA, 21 bp, Artificial Sequence
  source: /note="Description of Artificial Sequence: Synthetic oligonucleotide"
gaaagattcgaaggactcaga

SEQ ID NO: 30383 - DNA, 21 bp, Artificial Sequence
  source: /note="Description of Artificial Sequence: Synthetic oligonucleotide"
gaaagattcctcccagaactc

SEQ ID NO: 30384 - DNA, 21 bp, Artificial Sequence
  source: /note="Description of Artificial Sequence: Synthetic oligonucleotide"
gaaagattcacaagcgtccca

SEQ ID NO: 30385 - DNA, 21 bp, Artificial Sequence
  source: /note="Description of Artificial Sequence: Synthetic oligonucleotide"
gaaagaggaatgacaacacca

SEQ ID NO: 30386 - DNA, 21 bp, Artificial Sequence
  source: /note="Description of Artificial Sequence: Synthetic oligonucleotide"
gaaagaggagtcatccaccca

SEQ ID NO: 30387 - DNA, 21 bp, Artificial Sequence
  source: /note="Description of Artificial Sequence: Synthetic oligonucleotide"
gaaagacacgcagacatgaca

SEQ ID NO: 30388 - DNA, 21 bp, Artificial Sequence
  source: /note="Description of Artificial Sequence: Synthetic oligonucleotide"
gaaagacacgacctcccaaga

SEQ ID NO: 30389 - DNA, 21 bp, Artificial Sequence
  source: /note="Description of Artificial Sequence: Synthetic oligonucleotide"
gaaagacacgacgtcggacca

SEQ ID NO: 30390 - DNA, 21 bp, Artificial Sequence
  source: /note="Description of Artificial Sequence: Synthetic oligonucleotide"
gaaagacacatcagaatggaa

SEQ ID NO: 30391 - DNA, 21 bp, Artificial Sequence
  source: /note="Description of Artificial Sequence: Synthetic oligonucleotide"
gaaagacacagagtcatcgac

SEQ ID NO: 30392 - DNA, 21 bp, Artificial Sequence
  source: /note="Description of Artificial Sequence: Synthetic oligonucleotide"
gaaagaatcagaacaccagaa

SEQ ID NO: 30393 - DNA, 21 bp, Artificial Sequence
  source: /note="Description of Artificial Sequence: Synthetic oligonucleotide"
gaaagaatcagcccaagcatc

SEQ ID NO: 30394 - DNA, 21 bp, Artificial Sequence
  source: /note="Description of Artificial Sequence: Synthetic oligonucleotide"
gaaagaaaaggactcggactc

SEQ ID NO: 30395 - DNA, 21 bp, Artificial Sequence
  source: /note="Description of Artificial Sequence: Synthetic oligonucleotide"
gaaagaaaaaaccaaagccca

SEQ ID NO: 30396 - DNA, 21 bp, Artificial Sequence
  source: /note="Description of Artificial Sequence: Synthetic oligonucleotide"
gaaagaaaaacaccaagcgac

SEQ ID NO: 30397 - DNA, 21 bp, Artificial Sequence
  source: /note="Description of Artificial Sequence: Synthetic oligonucleotide"
gaaagactcgaaagcagcctc

SEQ ID NO: 30398 - DNA, 21 bp, Artificial Sequence
  source: /note="Description of Artificial Sequence: Synthetic oligonucleotide"
gaaagactcagcccagtcgca

SEQ ID NO: 30399 - DNA, 21 bp, Artificial Sequence
  source: /note="Description of Artificial Sequence: Synthetic oligonucleotide"
gaaagactcagcagcgaacca

SEQ ID NO: 30400 - DNA, 21 bp, Artificial Sequence
  source: /note="Description of Artificial Sequence: Synthetic oligonucleotide"
gaaagaatggcagcaccattc

SEQ ID NO: 30401 - DNA, 21 bp, Artificial Sequence
  source: /note="Description of Artificial Sequence: Synthetic oligonucleotide"
gaaagaaacttcgaaagcgga

SEQ ID NO: 30402 - DNA, 21 bp, Artificial Sequence
  source: /note="Description of Artificial Sequence: Synthetic oligonucleotide"
gaaagaaacggactcccagca

SEQ ID NO: 30403 - DNA, 21 bp, Artificial Sequence
  source: /note="Description of Artificial Sequence: Synthetic oligonucleotide"
gaaagaaacagagtcgacagc

SEQ ID NO: 30404 - DNA, 21 bp, Artificial Sequence
  source: /note="Description of Artificial Sequence: Synthetic oligonucleotide"
gaaagaaacagcccagtcgca

SEQ ID NO: 30405 - DNA, 21 bp, Artificial Sequence
  source: /note="Description of Artificial Sequence: Synthetic oligonucleotide"
gaaagaccagacggaccaagc

SEQ ID NO: 30406 - DNA, 21 bp, Artificial Sequence
  source: /note="Description of Artificial Sequence: Synthetic oligonucleotide"
gaaagaccaccactcgtcatg

SEQ ID NO: 30407 - DNA, 21 bp, Artificial Sequence
  source: /note="Description of Artificial Sequence: Synthetic oligonucleotide"
gaaagaccatacgcaacagtc

SEQ ID NO: 30408 - DNA, 21 bp, Artificial Sequence
  source: /note="Description of Artificial Sequence: Synthetic oligonucleotide"
gaaagacaagcattccacgaa

SEQ ID NO: 30409 - DNA, 21 bp, Artificial Sequence
  source: /note="Description of Artificial Sequence: Synthetic oligonucleotide"
gaaagacaaccaatgatcaaa

SEQ ID NO: 30410 - DNA, 21 bp, Artificial Sequence
  source: /note="Description of Artificial Sequence: Synthetic oligonucleotide"
gaaagacaaagagacagcgca

SEQ ID NO: 30411 - DNA, 21 bp, Artificial Sequence
  source: /note="Description of Artificial Sequence: Synthetic oligonucleotide"
gaaagacaaacaacactcgca

SEQ ID NO: 30412 - DNA, 21 bp, Artificial Sequence
  source: /note="Description of Artificial Sequence: Synthetic oligonucleotide"
gaaagaagaatcggagcaagc

SEQ ID NO: 30413 - DNA, 21 bp, Artificial Sequence
  source: /note="Description of Artificial Sequence: Synthetic oligonucleotide"
gaaagaagaccaggaacaagc

SEQ ID NO: 30414 - DNA, 21 bp, Artificial Sequence
  source: /note="Description of Artificial Sequence: Synthetic oligonucleotide"
gaaagaagcaaaccagtcgca

SEQ ID NO: 30415 - DNA, 21 bp, Artificial Sequence
  source: /note="Description of Artificial Sequence: Synthetic oligonucleotide"
gaaagaagcagaggacaacaa

SEQ ID NO: 30416 - DNA, 21 bp, Artificial Sequence
  source: /note="Description of Artificial Sequence: Synthetic oligonucleotide"
gaaagaagcagcccacaacca

SEQ ID NO: 30417 - DNA, 21 bp, Artificial Sequence
  source: /note="Description of Artificial Sequence: Synthetic oligonucleotide"
gaaagaagcagcagagaaaca

SEQ ID NO: 30418 - DNA, 21 bp, Artificial Sequence
  source: /note="Description of Artificial Sequence: Synthetic oligonucleotide"
gaaagaacagcagtcggagtc

SEQ ID NO: 30419 - DNA, 21 bp, Artificial Sequence
  source: /note="Description of Artificial Sequence: Synthetic oligonucleotide"
gaaagaacaaaaccaccaaca

SEQ ID NO: 30420 - DNA, 21 bp, Artificial Sequence
  source: /note="Description of Artificial Sequence: Synthetic oligonucleotide"
gaaagatacccaagcatcagc

SEQ ID NO: 30421 - DNA, 21 bp, Artificial Sequence
  source: /note="Description of Artificial Sequence: Synthetic oligonucleotide"
gaaagcgcattcaaaagatgc

SEQ ID NO: 30422 - DNA, 21 bp, Artificial Sequence
  source: /note="Description of Artificial Sequence: Synthetic oligonucleotide"
gaaagcgcatggatgcaagac

SEQ ID NO: 30423 - DNA, 21 bp, Artificial Sequence
  source: /note="Description of Artificial Sequence: Synthetic oligonucleotide"
gaaagcttcacaggagtccac

SEQ ID NO: 30424 - DNA, 21 bp, Artificial Sequence
  source: /note="Description of Artificial Sequence: Synthetic oligonucleotide"
gaaagcggagacaaactcaga

SEQ ID NO: 30425 - DNA, 21 bp, Artificial Sequence
  source: /note="Description of Artificial Sequence: Synthetic oligonucleotide"
gaaagcggaatcctccaactc

SEQ ID NO: 30426 - DNA, 21 bp, Artificial Sequence
  source: /note="Description of Artificial Sequence: Synthetic oligonucleotide"
gaaagcggactcacacaaaca

SEQ ID NO: 30427 - DNA, 21 bp, Artificial Sequence
  source: /note="Description of Artificial Sequence: Synthetic oligonucleotide"
gaaagcggaagaccaatggtc

SEQ ID NO: 30428 - DNA, 21 bp, Artificial Sequence
  source: /note="Description of Artificial Sequence: Synthetic oligonucleotide"
gaaagcatcacaagaagcgtc

SEQ ID NO: 30429 - DNA, 21 bp, Artificial Sequence
  source: /note="Description of Artificial Sequence: Synthetic oligonucleotide"
gaaagcatcgtcggaagaaga

SEQ ID NO: 30430 - DNA, 21 bp, Artificial Sequence
  source: /note="Description of Artificial Sequence: Synthetic oligonucleotide"
gaaagcaaagaactcacaagc

SEQ ID NO: 30431 - DNA, 21 bp, Artificial Sequence
  source: /note="Description of Artificial Sequence: Synthetic oligonucleotide"
gaaagcaaaggagcacacgca

SEQ ID NO: 30432 - DNA, 21 bp, Artificial Sequence
  source: /note="Description of Artificial Sequence: Synthetic oligonucleotide"
gaaagcaaacacttcagccca

SEQ ID NO: 30433 - DNA, 21 bp, Artificial Sequence
  source: /note="Description of Artificial Sequence: Synthetic oligonucleotide"
gaaagcaaaatcggaagacca

SEQ ID NO: 30434 - DNA, 21 bp, Artificial Sequence
  source: /note="Description of Artificial Sequence: Synthetic oligonucleotide"
gaaagcaaaccaaacagcaga

SEQ ID NO: 30435 - DNA, 21 bp, Artificial Sequence
  source: /note="Description of Artificial Sequence: Synthetic oligonucleotide"
gaaagcccagacagaagcaca

SEQ ID NO: 30436 - DNA, 21 bp, Artificial Sequence
  source: /note="Description of Artificial Sequence: Synthetic oligonucleotide"
gaaagcccattcagcgtccca

SEQ ID NO: 30437 - DNA, 21 bp, Artificial Sequence
  source: /note="Description of Artificial Sequence: Synthetic oligonucleotide"
gaaagcccaaaagcagaccca

SEQ ID NO: 30438 - DNA, 21 bp, Artificial Sequence
  source: /note="Description of Artificial Sequence: Synthetic oligonucleotide"
gaaagcccaatggtcagccca

SEQ ID NO: 30439 - DNA, 21 bp, Artificial Sequence
  source: /note="Description of Artificial Sequence: Synthetic oligonucleotide"
gaaagccaagtcctcgtctac

SEQ ID NO: 30440 - DNA, 21 bp, Artificial Sequence
  source: /note="Description of Artificial Sequence: Synthetic oligonucleotide"
gaaagcagacaagcattccca

SEQ ID NO: 30441 - DNA, 21 bp, Artificial Sequence
  source: /note="Description of Artificial Sequence: Synthetic oligonucleotide"
gaaagcagaagcgcagcatac

SEQ ID NO: 30442 - DNA, 21 bp, Artificial Sequence
  source: /note="Description of Artificial Sequence: Synthetic oligonucleotide"
gaaagcagaagcgcactccca

SEQ ID NO: 30443 - DNA, 21 bp, Artificial Sequence
  source: /note="Description of Artificial Sequence: Synthetic oligonucleotide"
gaaagcagagtcggatacatc

SEQ ID NO: 30444 - DNA, 21 bp, Artificial Sequence
  source: /note="Description of Artificial Sequence: Synthetic oligonucleotide"
gaaagcagagtcagcctcgga

SEQ ID NO: 30445 - DNA, 21 bp, Artificial Sequence
  source: /note="Description of Artificial Sequence: Synthetic oligonucleotide"
gaaagcagccaacacctcgac

SEQ ID NO: 30446 - DNA, 21 bp, Artificial Sequence
  source: /note="Description of Artificial Sequence: Synthetic oligonucleotide"
gaaagcagcagagaattccac

SEQ ID NO: 30447 - DNA, 21 bp, Artificial Sequence
  source: /note="Description of Artificial Sequence: Synthetic oligonucleotide"
gaaagcagcagagaactccac

SEQ ID NO: 30448 - DNA, 21 bp, Artificial Sequence
  source: /note="Description of Artificial Sequence: Synthetic oligonucleotide"
gaaagcagcagcgaactccac

SEQ ID NO: 30449 - DNA, 21 bp, Artificial Sequence
  source: /note="Description of Artificial Sequence: Synthetic oligonucleotide"
gaaagcagcagcagaatgctc

SEQ ID NO: 30450 - DNA, 21 bp, Artificial Sequence
  source: /note="Description of Artificial Sequence: Synthetic oligonucleotide"
gaaagcacagcactcaaaaga

SEQ ID NO: 30451 - DNA, 21 bp, Artificial Sequence
  source: /note="Description of Artificial Sequence: Synthetic oligonucleotide"
gaaagcacaagcagcagaagc

SEQ ID NO: 30452 - DNA, 21 bp, Artificial Sequence
  source: /note="Description of Artificial Sequence: Synthetic oligonucleotide"
gaaagcgtcgaaaacgacagc

SEQ ID NO: 30453 - DNA, 21 bp, Artificial Sequence
  source: /note="Description of Artificial Sequence: Synthetic oligonucleotide"
gaaagcgtcttcaaagcagca

SEQ ID NO: 30454 - DNA, 21 bp, Artificial Sequence
  source: /note="Description of Artificial Sequence: Synthetic oligonucleotide"
gaaagcgtcggatacgcagac

SEQ ID NO: 30455 - DNA, 21 bp, Artificial Sequence
  source: /note="Description of Artificial Sequence: Synthetic oligonucleotide"
gaaagcgtcagactccaaaac

SEQ ID NO: 30456 - DNA, 21 bp, Artificial Sequence
  source: /note="Description of Artificial Sequence: Synthetic oligonucleotide"
gaaagctacacagaaagcctc

SEQ ID NO: 30457 - DNA, 21 bp, Artificial Sequence
  source: /note="Description of Artificial Sequence: Synthetic oligonucleotide"
gaaacagcaaaaagcggacaa

SEQ ID NO: 30458 - DNA, 21 bp, Artificial Sequence
  source: /note="Description of Artificial Sequence: Synthetic oligonucleotide"
gaaacagacagaaaactcagc

SEQ ID NO: 30459 - DNA, 21 bp, Artificial Sequence
  source: /note="Description of Artificial Sequence: Synthetic oligonucleotide"
gaaacagacagaaacgcaagc

SEQ ID NO: 30460 - DNA, 21 bp, Artificial Sequence
  source: /note="Description of Artificial Sequence: Synthetic oligonucleotide"
gaaacagaacacacagtcgtc

SEQ ID NO: 30461 - DNA, 21 bp, Artificial Sequence
  source: /note="Description of Artificial Sequence: Synthetic oligonucleotide"
gaaacattcacaagaagcgtc

SEQ ID NO: 30462 - DNA, 21 bp, Artificial Sequence
  source: /note="Description of Artificial Sequence: Synthetic oligonucleotide"
gaaacaggaaaagacagaatg

SEQ ID NO: 30463 - DNA, 21 bp, Artificial Sequence
  source: /note="Description of Artificial Sequence: Synthetic oligonucleotide"
gaaacaggaagccacacaaca

SEQ ID NO: 30464 - DNA, 21 bp, Artificial Sequence
  source: /note="Description of Artificial Sequence: Synthetic oligonucleotide"
gaaacaggaagcagagcagtc

SEQ ID NO: 30465 - DNA, 21 bp, Artificial Sequence
  source: /note="Description of Artificial Sequence: Synthetic oligonucleotide"
gaaacaaaattcagcatggga

SEQ ID NO: 30466 - DNA, 21 bp, Artificial Sequence
  source: /note="Description of Artificial Sequence: Synthetic oligonucleotide"
gaaacaaaaggaagcgtcgca

SEQ ID NO: 30467 - DNA, 21 bp, Artificial Sequence
  source: /note="Description of Artificial Sequence: Synthetic oligonucleotide"
gaaacaaaaaaagactacagc

SEQ ID NO: 30468 - DNA, 21 bp, Artificial Sequence
  source: /note="Description of Artificial Sequence: Synthetic oligonucleotide"
gaaacactcgaagtcagcctc

SEQ ID NO: 30469 - DNA, 21 bp, Artificial Sequence
  source: /note="Description of Artificial Sequence: Synthetic oligonucleotide"
gaaacactcagcggaaacgaa

SEQ ID NO: 30470 - DNA, 21 bp, Artificial Sequence
  source: /note="Description of Artificial Sequence: Synthetic oligonucleotide"
gaaacaatgagaaaagaccca

SEQ ID NO: 30471 - DNA, 21 bp, Artificial Sequence
  source: /note="Description of Artificial Sequence: Synthetic oligonucleotide"
gaaacaaacttcagcggagca

SEQ ID NO: 30472 - DNA, 21 bp, Artificial Sequence
  source: /note="Description of Artificial Sequence: Synthetic oligonucleotide"
gaaacaaacccaagatgcagc

SEQ ID NO: 30473 - DNA, 21 bp, Artificial Sequence
  source: /note="Description of Artificial Sequence: Synthetic oligonucleotide"
gaaacaccattcaaaccaagc

SEQ ID NO: 30474 - DNA, 21 bp, Artificial Sequence
  source: /note="Description of Artificial Sequence: Synthetic oligonucleotide"
gaaacaccaatcgacagcgac

SEQ ID NO: 30475 - DNA, 21 bp, Artificial Sequence
  source: /note="Description of Artificial Sequence: Synthetic oligonucleotide"
gaaacaccaaaccacagcaga

SEQ ID NO: 30476 - DNA, 21 bp, Artificial Sequence
  source: /note="Description of Artificial Sequence: Synthetic oligonucleotide"
gaaacaagaggacacctcatc

SEQ ID NO: 30477 - DNA, 21 bp, Artificial Sequence
  source: /note="Description of Artificial Sequence: Synthetic oligonucleotide"
gaaacaagactcgtcccaaca

SEQ ID NO: 30478 - DNA, 21 bp, Artificial Sequence
  source: /note="Description of Artificial Sequence: Synthetic oligonucleotide"
gaaacaagaaacctccacgga

SEQ ID NO: 30479 - DNA, 21 bp, Artificial Sequence
  source: /note="Description of Artificial Sequence: Synthetic oligonucleotide"
gaaacaagaaaccaattcgga

SEQ ID NO: 30480 - DNA, 21 bp, Artificial Sequence
  source: /note="Description of Artificial Sequence: Synthetic oligonucleotide"
gaaacaagaagcacaagagaa

SEQ ID NO: 30481 - DNA, 21 bp, Artificial Sequence
  source: /note="Description of Artificial Sequence: Synthetic oligonucleotide"
gaaacaagatacccagacatg

SEQ ID NO: 30482 - DNA, 21 bp, Artificial Sequence
  source: /note="Description of Artificial Sequence: Synthetic oligonucleotide"
gaaacaagccacagcgtcagc

SEQ ID NO: 30483 - DNA, 21 bp, Artificial Sequence
  source: /note="Description of Artificial Sequence: Synthetic oligonucleotide"
gaaacaagcagagcaagcaca

SEQ ID NO: 30484 - DNA, 21 bp, Artificial Sequence
  source: /note="Description of Artificial Sequence: Synthetic oligonucleotide"
gaaacaagcagaccaacagtc

SEQ ID NO: 30485 - DNA, 21 bp, Artificial Sequence
  source: /note="Description of Artificial Sequence: Synthetic oligonucleotide"
gaaacaagcagcgcatacctc

SEQ ID NO: 30486 - DNA, 21 bp, Artificial Sequence
  source: /note="Description of Artificial Sequence: Synthetic oligonucleotide"
gaaacaacacaaaactacatc

SEQ ID NO: 30487 - DNA, 21 bp, Artificial Sequence
  source: /note="Description of Artificial Sequence: Synthetic oligonucleotide"
gaaacaacaagcctcccaaga

SEQ ID NO: 30488 - DNA, 21 bp, Artificial Sequence
  source: /note="Description of Artificial Sequence: Synthetic oligonucleotide"
gaaacaacagtccaagcaagc

SEQ ID NO: 30489 - DNA, 21 bp, Artificial Sequence
  source: /note="Description of Artificial Sequence: Synthetic oligonucleotide"
gaaacagtcttccacgtcgca

SEQ ID NO: 30490 - DNA, 21 bp, Artificial Sequence
  source: /note="Description of Artificial Sequence: Synthetic oligonucleotide"
gaagtcgcagtccaaccaatg

SEQ ID NO: 30491 - DNA, 21 bp, Artificial Sequence
  source: /note="Description of Artificial Sequence: Synthetic oligonucleotide"
gaagtcggaagaaacagcaca

SEQ ID NO: 30492 - DNA, 21 bp, Artificial Sequence
  source: /note="Description of Artificial Sequence: Synthetic oligonucleotide"
gaagtccacccaggacaagca

SEQ ID NO: 30493 - DNA, 21 bp, Artificial Sequence
  source: /note="Description of Artificial Sequence: Synthetic oligonucleotide"
gaagtcaaagaacaaacagtc

SEQ ID NO: 30494 - DNA, 21 bp, Artificial Sequence
  source: /note="Description of Artificial Sequence: Synthetic oligonucleotide"
gaagtcaaaagcttcagcagc

SEQ ID NO: 30495 - DNA, 21 bp, Artificial Sequence
  source: /note="Description of Artificial Sequence: Synthetic oligonucleotide"
gaagtcccagcagcaagaagc

SEQ ID NO: 30496 - DNA, 21 bp, Artificial Sequence
  source: /note="Description of Artificial Sequence: Synthetic oligonucleotide"
gaagtcccaaacagcagcgca

SEQ ID NO: 30497 - DNA, 21 bp, Artificial Sequence
  source: /note="Description of Artificial Sequence: Synthetic oligonucleotide"
gaagtccaactcccagcaaga

SEQ ID NO: 30498 - DNA, 21 bp, Artificial Sequence
  source: /note="Description of Artificial Sequence: Synthetic oligonucleotide"
gaagtcagaaaaggagcacaa

SEQ ID NO: 30499 - DNA, 21 bp, Artificial Sequence
  source: /note="Description of Artificial Sequence: Synthetic oligonucleotide"
gaagtcagactcagcaacgca

SEQ ID NO: 30500 - DNA, 21 bp, Artificial Sequence
  source: /note="Description of Artificial Sequence: Synthetic oligonucleotide"
gaagtcagcttcctcccacca

SEQ ID NO: 30501 - DNA, 21 bp, Artificial Sequence
  source: /note="Description of Artificial Sequence: Synthetic oligonucleotide"
gaagtcagcctcagcacaaga

SEQ ID NO: 30502 - DNA, 21 bp, Artificial Sequence
  source: /note="Description of Artificial Sequence: Synthetic oligonucleotide"
gaagtcagcatgctcagcaaa

SEQ ID NO: 30503 - DNA, 21 bp, Artificial Sequence
  source: /note="Description of Artificial Sequence: Synthetic oligonucleotide"
gaagtcacaggaagagcagga

SEQ ID NO: 30504 - DNA, 21 bp, Artificial Sequence
  source: /note="Description of Artificial Sequence: Synthetic oligonucleotide"
gaagtcacaatgaaacacaca

SEQ ID NO: 30505 - DNA, 21 bp, Artificial Sequence
  source: /note="Description of Artificial Sequence: Synthetic oligonucleotide"
gaagtcacaaacccaagcgca

SEQ ID NO: 30506 - DNA, 21 bp, Artificial Sequence
  source: /note="Description of Artificial Sequence: Synthetic oligonucleotide"
gaagtcacagtcggactccca

SEQ ID NO: 30507 - DNA, 21 bp, Artificial Sequence
  source: /note="Description of Artificial Sequence: Synthetic oligonucleotide"
gaatgggcagacagcagcgga

SEQ ID NO: 30508 - DNA, 21 bp, Artificial Sequence
  source: /note="Description of Artificial Sequence: Synthetic oligonucleotide"
gaatggaacagacaagcaaac

SEQ ID NO: 30509 - DNA, 21 bp, Artificial Sequence
  source: /note="Description of Artificial Sequence: Synthetic oligonucleotide"
gaatacgcaagcctcggactc

SEQ ID NO: 30510 - DNA, 21 bp, Artificial Sequence
  source: /note="Description of Artificial Sequence: Synthetic oligonucleotide"
gaatacgaccacagcatgctc

SEQ ID NO: 30511 - DNA, 21 bp, Artificial Sequence
  source: /note="Description of Artificial Sequence: Synthetic oligonucleotide"
gaatacatcagaggaaaagaa

SEQ ID NO: 30512 - DNA, 21 bp, Artificial Sequence
  source: /note="Description of Artificial Sequence: Synthetic oligonucleotide"
gaatacctcgacgaaagcgga

SEQ ID NO: 30513 - DNA, 21 bp, Artificial Sequence
  source: /note="Description of Artificial Sequence: Synthetic oligonucleotide"
gaatacctcccaaacagcgca

SEQ ID NO: 30514 - DNA, 21 bp, Artificial Sequence
  source: /note="Description of Artificial Sequence: Synthetic oligonucleotide"
gaatacccagcacacctcaca

SEQ ID NO: 30515 - DNA, 21 bp, Artificial Sequence
  source: /note="Description of Artificial Sequence: Synthetic oligonucleotide"
gaatacccactcaacacagga

SEQ ID NO: 30516 - DNA, 21 bp, Artificial Sequence
  source: /note="Description of Artificial Sequence: Synthetic oligonucleotide"
gaataccaaagaccagaccca

SEQ ID NO: 30517 - DNA, 21 bp, Artificial Sequence
  source: /note="Description of Artificial Sequence: Synthetic oligonucleotide"
gaatacagcttcccaaaagaa

SEQ ID NO: 30518 - DNA, 21 bp, Artificial Sequence
  source: /note="Description of Artificial Sequence: Synthetic oligonucleotide"
gaatacacaccaatcagcgga

SEQ ID NO: 30519 - DNA, 21 bp, Artificial Sequence
  source: /note="Description of Artificial Sequence: Synthetic oligonucleotide"
gaatacgtcggagtccaaaga

SEQ ID NO: 30520 - DNA, 21 bp, Artificial Sequence
  source: /note="Description of Artificial Sequence: Synthetic oligonucleotide"
ttcgcagcaaaagacgtcaca

SEQ ID NO: 30521 - DNA, 21 bp, Artificial Sequence
  source: /note="Description of Artificial Sequence: Synthetic oligonucleotide"
ttcgcagcaaaaatgccaagc

SEQ ID NO: 30522 - DNA, 21 bp, Artificial Sequence
  source: /note="Description of Artificial Sequence: Synthetic oligonucleotide"
ttcgcagcactcagagtcgac

SEQ ID NO: 30523 - DNA, 21 bp, Artificial Sequence
  source: /note="Description of Artificial Sequence: Synthetic oligonucleotide"
ttcgcagcacaagtcgaagac

SEQ ID NO: 30524 - DNA, 21 bp, Artificial Sequence
  source: /note="Description of Artificial Sequence: Synthetic oligonucleotide"
ttcgcagcaagcagccaagac

SEQ ID NO: 30525 - DNA, 21 bp, Artificial Sequence
  source: /note="Description of Artificial Sequence: Synthetic oligonucleotide"
ttcgcagacgcaatggtcatg

SEQ ID NO: 30526 - DNA, 21 bp, Artificial Sequence
  source: /note="Description of Artificial Sequence: Synthetic oligonucleotide"
ttcgcagaaaaaagcagagga

SEQ ID NO: 30527 - DNA, 21 bp, Artificial Sequence
  source: /note="Description of Artificial Sequence: Synthetic oligonucleotide"
ttcgcaggaatcgcacaatac

SEQ ID NO: 30528 - DNA, 21 bp, Artificial Sequence
  source: /note="Description of Artificial Sequence: Synthetic oligonucleotide"
ttcgcaggaaaacaccaaaac

SEQ ID NO: 30529 - DNA, 21 bp, Artificial Sequence
  source: /note="Description of Artificial Sequence: Synthetic oligonucleotide"
ttcgcaggactcacaccagtc

SEQ ID NO: 30530 - DNA, 21 bp, Artificial Sequence
  source: /note="Description of Artificial Sequence: Synthetic oligonucleotide"
ttcgcaggaaacagcccaagc

SEQ ID NO: 30531 - DNA, 21 bp, Artificial Sequence
  source: /note="Description of Artificial Sequence: Synthetic oligonucleotide"
ttcgcacacacagcaagacca

SEQ ID NO: 30532 - DNA, 21 bp, Artificial Sequence
  source: /note="Description of Artificial Sequence: Synthetic oligonucleotide"
ttcgcaaaacacggaggacca

SEQ ID NO: 30533 - DNA, 21 bp, Artificial Sequence
  source: /note="Description of Artificial Sequence: Synthetic oligonucleotide"
ttcgcaaaaccagcaagcctc

SEQ ID NO: 30534 - DNA, 21 bp, Artificial Sequence
  source: /note="Description of Artificial Sequence: Synthetic oligonucleotide"
ttcgcactcgaaggaagaagc

SEQ ID NO: 30535 - DNA, 21 bp, Artificial Sequence
  source: /note="Description of Artificial Sequence: Synthetic oligonucleotide"
ttcgcactcagcgcaagcctc

SEQ ID NO: 30536 - DNA, 21 bp, Artificial Sequence
  source: /note="Description of Artificial Sequence: Synthetic oligonucleotide"
ttcgcaatggcaaacgacaaa

SEQ ID NO: 30537 - DNA, 21 bp, Artificial Sequence
  source: /note="Description of Artificial Sequence: Synthetic oligonucleotide"
ttcgcaaacagagcaacaatc

SEQ ID NO: 30538 - DNA, 21 bp, Artificial Sequence
  source: /note="Description of Artificial Sequence: Synthetic oligonucleotide"
ttcgcaaacagcgcagtcgaa

SEQ ID NO: 30539 - DNA, 21 bp, Artificial Sequence
  source: /note="Description of Artificial Sequence: Synthetic oligonucleotide"
ttcgcaccaggacacgcaatc

SEQ ID NO: 30540 - DNA, 21 bp, Artificial Sequence
  source: /note="Description of Artificial Sequence: Synthetic oligonucleotide"
ttcgcaccactcagcccacac

SEQ ID NO: 30541 - DNA, 21 bp, Artificial Sequence
  source: /note="Description of Artificial Sequence: Synthetic oligonucleotide"
ttcgcaccaccaccagcattc

SEQ ID NO: 30542 - DNA, 21 bp, Artificial Sequence
  source: /note="Description of Artificial Sequence: Synthetic oligonucleotide"
ttcgcaccaagcagaaacgac

SEQ ID NO: 30543 - DNA, 21 bp, Artificial Sequence
  source: /note="Description of Artificial Sequence: Synthetic oligonucleotide"
ttcgcacaaaaactcagccca

SEQ ID NO: 30544 - DNA, 21 bp, Artificial Sequence
  source: /note="Description of Artificial Sequence: Synthetic oligonucleotide"
ttcgcacaaaaaaacctcagc

SEQ ID NO: 30545 - DNA, 21 bp, Artificial Sequence
  source: /note="Description of Artificial Sequence: Synthetic oligonucleotide"
ttcgcaagaaacccagacgca

SEQ ID NO: 30546 - DNA, 21 bp, Artificial Sequence
  source: /note="Description of Artificial Sequence: Synthetic oligonucleotide"
ttcgcaagaccagacagcatg

SEQ ID NO: 30547 - DNA, 21 bp, Artificial Sequence
  source: /note="Description of Artificial Sequence: Synthetic oligonucleotide"
ttcgcaagaagcagcatccca

SEQ ID NO: 30548 - DNA, 21 bp, Artificial Sequence
  source: /note="Description of Artificial Sequence: Synthetic oligonucleotide"
ttcgcaagcgcagcaccaaga

SEQ ID NO: 30549 - DNA, 21 bp, Artificial Sequence
  source: /note="Description of Artificial Sequence: Synthetic oligonucleotide"
ttcgcaagcgcaagagcacaa

SEQ ID NO: 30550 - DNA, 21 bp, Artificial Sequence
  source: /note="Description of Artificial Sequence: Synthetic oligonucleotide"
ttcgcaagcggacacttcaac

SEQ ID NO: 30551 - DNA, 21 bp, Artificial Sequence
  source: /note="Description of Artificial Sequence: Synthetic oligonucleotide"
ttcgcaagcctcgtcacaaac

SEQ ID NO: 30552 - DNA, 21 bp, Artificial Sequence
  source: /note="Description of Artificial Sequence: Synthetic oligonucleotide"
ttcgcaagcagcagaaacaac

SEQ ID NO: 30553 - DNA, 21 bp, Artificial Sequence
  source: /note="Description of Artificial Sequence: Synthetic oligonucleotide"
ttcgcaagcagcagcagccac

SEQ ID NO: 30554 - DNA, 21 bp, Artificial Sequence
  source: /note="Description of Artificial Sequence: Synthetic oligonucleotide"
ttcgcaagcgtcagaacagtc

SEQ ID NO: 30555 - DNA, 21 bp, Artificial Sequence
  source: /note="Description of Artificial Sequence: Synthetic oligonucleotide"
ttcgcaagctacggaagccca

SEQ ID NO: 30556 - DNA, 21 bp, Artificial Sequence
  source: /note="Description of Artificial Sequence: Synthetic oligonucleotide"
ttcgcaacaagcggatacgca

SEQ ID NO: 30557 - DNA, 21 bp, Artificial Sequence
  source: /note="Description of Artificial Sequence: Synthetic oligonucleotide"
ttcgcaacaagcacaacacca

SEQ ID NO: 30558 - DNA, 21 bp, Artificial Sequence
  source: /note="Description of Artificial Sequence: Synthetic oligonucleotide"
ttcgcaacaacaaaactcgac

SEQ ID NO: 30559 - DNA, 21 bp, Artificial Sequence
  source: /note="Description of Artificial Sequence: Synthetic oligonucleotide"
ttctgcagcgaacaacacagc

SEQ ID NO: 30560 - DNA, 21 bp, Artificial Sequence
  source: /note="Description of Artificial Sequence: Synthetic oligonucleotide"
ttcgacgcaccacaaacaaga

SEQ ID NO: 30561 - DNA, 21 bp, Artificial Sequence
  source: /note="Description of Artificial Sequence: Synthetic oligonucleotide"
ttcgacgcataccacagactc

SEQ ID NO: 30562 - DNA, 21 bp, Artificial Sequence
  source: /note="Description of Artificial Sequence: Synthetic oligonucleotide"
ttcgacgacttcgcactcgac

SEQ ID NO: 30563 - DNA, 21 bp, Artificial Sequence
  source: /note="Description of Artificial Sequence: Synthetic oligonucleotide"
ttcgacgaagcacacgcacca

SEQ ID NO: 30564 - DNA, 21 bp, Artificial Sequence
  source: /note="Description of Artificial Sequence: Synthetic oligonucleotide"
ttcgacgaagacgacctcgca

SEQ ID NO: 30565 - DNA, 21 bp, Artificial Sequence
  source: /note="Description of Artificial Sequence: Synthetic oligonucleotide"
ttcgacggagcaagaagcgaa

SEQ ID NO: 30566 - DNA, 21 bp, Artificial Sequence
  source: /note="Description of Artificial Sequence: Synthetic oligonucleotide"
ttcgacggaatcagaccaaca

SEQ ID NO: 30567 - DNA, 21 bp, Artificial Sequence
  source: /note="Description of Artificial Sequence: Synthetic oligonucleotide"
ttcgaccacccaagcttccca

SEQ ID NO: 30568 - DNA, 21 bp, Artificial Sequence
  source: /note="Description of Artificial Sequence: Synthetic oligonucleotide"
ttcgaccacccagtcagaatg

SEQ ID NO: 30569 - DNA, 21 bp, Artificial Sequence
  source: /note="Description of Artificial Sequence: Synthetic oligonucleotide"
ttcgaccacacaaaagcatgg

SEQ ID NO: 30570 - DNA, 21 bp, Artificial Sequence
  source: /note="Description of Artificial Sequence: Synthetic oligonucleotide"
ttcgacaaaagcacaaaatac

SEQ ID NO: 30571 - DNA, 21 bp, Artificial Sequence
  source: /note="Description of Artificial Sequence: Synthetic oligonucleotide"
ttcgaccaacacacaagaagc

SEQ ID NO: 30572 - DNA, 21 bp, Artificial Sequence
  source: /note="Description of Artificial Sequence: Synthetic oligonucleotide"
ttcgacagagcaatgcaaaga

SEQ ID NO: 30573 - DNA, 21 bp, Artificial Sequence
  source: /note="Description of Artificial Sequence: Synthetic oligonucleotide"
ttcgacagacaaacacaaatc

SEQ ID NO: 30574 - DNA, 21 bp, Artificial Sequence
  source: /note="Description of Artificial Sequence: Synthetic oligonucleotide"
ttcgacagcgtcagactcagc

SEQ ID NO: 30575 - DNA, 21 bp, Artificial Sequence
  source: /note="Description of Artificial Sequence: Synthetic oligonucleotide"
ttcgacacagcagtcaacgca

SEQ ID NO: 30576 - DNA, 21 bp, Artificial Sequence
  source: /note="Description of Artificial Sequence: Synthetic oligonucleotide"
ttcgacacaggaaaattcgca

SEQ ID NO: 30577 - DNA, 21 bp, Artificial Sequence
  source: /note="Description of Artificial Sequence: Synthetic oligonucleotide"
ttcgactacggaccaatggac

SEQ ID NO: 30578 - DNA, 21 bp, Artificial Sequence
  source: /note="Description of Artificial Sequence: Synthetic oligonucleotide"
ttcgaagcaaaaagcagcctc

SEQ ID NO: 30579 - DNA, 21 bp, Artificial Sequence
  source: /note="Description of Artificial Sequence: Synthetic oligonucleotide"
ttcgaagcaaaagtcacaaga

SEQ ID NO: 30580 - DNA, 21 bp, Artificial Sequence
  source: /note="Description of Artificial Sequence: Synthetic oligonucleotide"
ttcgaagcaagactcggaaca

SEQ ID NO: 30581 - DNA, 21 bp, Artificial Sequence
  source: /note="Description of Artificial Sequence: Synthetic oligonucleotide"
ttcgaagacggaagcctcgca

SEQ ID NO: 30582 - DNA, 21 bp, Artificial Sequence
  source: /note="Description of Artificial Sequence: Synthetic oligonucleotide"
ttcgaaggaagccaaccacca

SEQ ID NO: 30583 - DNA, 21 bp, Artificial Sequence
  source: /note="Description of Artificial Sequence: Synthetic oligonucleotide"
ttcgaaggagtccaaagcagc

SEQ ID NO: 30584 - DNA, 21 bp, Artificial Sequence
  source: /note="Description of Artificial Sequence: Synthetic oligonucleotide"
ttcgaacaccactacacacca

SEQ ID NO: 30585 - DNA, 21 bp, Artificial Sequence
  source: /note="Description of Artificial Sequence: Synthetic oligonucleotide"
ttcgaaaaaagactcacaatc

SEQ ID NO: 30586 - DNA, 21 bp, Artificial Sequence
  source: /note="Description of Artificial Sequence: Synthetic oligonucleotide"
ttcgaaaaaagcctcccagac

SEQ ID NO: 30587 - DNA, 21 bp, Artificial Sequence
  source: /note="Description of Artificial Sequence: Synthetic oligonucleotide"
ttcgaaatggtcagcagcctc

SEQ ID NO: 30588 - DNA, 21 bp, Artificial Sequence
  source: /note="Description of Artificial Sequence: Synthetic oligonucleotide"
ttcgaaaacaaataccacgtc

SEQ ID NO: 30589 - DNA, 21 bp, Artificial Sequence
  source: /note="Description of Artificial Sequence: Synthetic oligonucleotide"
ttcgaaccagcacacgcaagc

SEQ ID NO: 30590 - DNA, 21 bp, Artificial Sequence
  source: /note="Description of Artificial Sequence: Synthetic oligonucleotide"
ttcgaaccaagccaactcaga

SEQ ID NO: 30591 - DNA, 21 bp, Artificial Sequence
  source: /note="Description of Artificial Sequence: Synthetic oligonucleotide"
ttcgaaccagtccaaaacaca

SEQ ID NO: 30592 - DNA, 21 bp, Artificial Sequence
  source: /note="Description of Artificial Sequence: Synthetic oligonucleotide"
ttcgaacaactcctcgacttc

SEQ ID NO: 30593 - DNA, 21 bp, Artificial Sequence
  source: /note="Description of Artificial Sequence: Synthetic oligonucleotide"
ttcgaaagaaacagaacaagc

SEQ ID NO: 30594 - DNA, 21 bp, Artificial Sequence
  source: /note="Description of Artificial Sequence: Synthetic oligonucleotide"
ttcgaaagaccaacagtcatc

SEQ ID NO: 30595 - DNA, 21 bp, Artificial Sequence
  source: /note="Description of Artificial Sequence: Synthetic oligonucleotide"
ttcgaaagaagcagcggaaca

SEQ ID NO: 30596 - DNA, 21 bp, Artificial Sequence
  source: /note="Description of Artificial Sequence: Synthetic oligonucleotide"
ttcgaaagagtcccactcgac

SEQ ID NO: 30597 - DNA, 21 bp, Artificial Sequence
  source: /note="Description of Artificial Sequence: Synthetic oligonucleotide"
ttcgaaagcaacagcgtcctc

SEQ ID NO: 30598 - DNA, 21 bp, Artificial Sequence
  source: /note="Description of Artificial Sequence: Synthetic oligonucleotide"
ttcgaaagcacaacaagcgtc

SEQ ID NO: 30599 - DNA, 21 bp, Artificial Sequence
  source: /note="Description of Artificial Sequence: Synthetic oligonucleotide"
ttcgaaacaagatacgaagca

SEQ ID NO: 30600 - DNA, 21 bp, Artificial Sequence
  source: /note="Description of Artificial Sequence: Synthetic oligonucleotide"
ttcgaaacaacaatcagactc

SEQ ID NO: 30601 - DNA, 21 bp, Artificial Sequence
  source: /note="Description of Artificial Sequence: Synthetic oligonucleotide"
ttcgaagtcccaagcacaaga

SEQ ID NO: 30602 - DNA, 21 bp, Artificial Sequence
  source: /note="Description of Artificial Sequence: Synthetic oligonucleotide"
ttcgaataccacgcaagcgga

SEQ ID NO: 30603 - DNA, 21 bp, Artificial Sequence
  source: /note="Description of Artificial Sequence: Synthetic oligonucleotide"
ttcttcggaccaggaccaaca

SEQ ID NO: 30604 - DNA, 21 bp, Artificial Sequence
  source: /note="Description of Artificial Sequence: Synthetic oligonucleotide"
ttcttcccaatcacaagcgca

SEQ ID NO: 30605 - DNA, 21 bp, Artificial Sequence
  source: /note="Description of Artificial Sequence: Synthetic oligonucleotide"
ttcttcagcgacggaagagtc

SEQ ID NO: 30606 - DNA, 21 bp, Artificial Sequence
  source: /note="Description of Artificial Sequence: Synthetic oligonucleotide"
ttcggagcatgcagagtcagc

SEQ ID NO: 30607 - DNA, 21 bp, Artificial Sequence
  source: /note="Description of Artificial Sequence: Synthetic oligonucleotide"
ttcggagcagaaccagacgca

SEQ ID NO: 30608 - DNA, 21 bp, Artificial Sequence
  source: /note="Description of Artificial Sequence: Synthetic oligonucleotide"
ttcggagacagaccattccca

SEQ ID NO: 30609 - DNA, 21 bp, Artificial Sequence
  source: /note="Description of Artificial Sequence: Synthetic oligonucleotide"
ttcggaggaggaagaccagaa

SEQ ID NO: 30610 - DNA, 21 bp, Artificial Sequence
  source: /note="Description of Artificial Sequence: Synthetic oligonucleotide"
ttcggaggacaaggaggacaa

SEQ ID NO: 30611 - DNA, 21 bp, Artificial Sequence
  source: /note="Description of Artificial Sequence: Synthetic oligonucleotide"
ttcggaggaacaggacaattc

SEQ ID NO: 30612 - DNA, 21 bp, Artificial Sequence
  source: /note="Description of Artificial Sequence: Synthetic oligonucleotide"
ttcggacacatgaaaacacca

SEQ ID NO: 30613 - DNA, 21 bp, Artificial Sequence
  source: /note="Description of Artificial Sequence: Synthetic oligonucleotide"
ttcggacacccaatcgcaagc

SEQ ID NO: 30614 - DNA, 21 bp, Artificial Sequence
  source: /note="Description of Artificial Sequence: Synthetic oligonucleotide"
ttcggacacgtccacctcaac

SEQ ID NO: 30615 - DNA, 21 bp, Artificial Sequence
  source: /note="Description of Artificial Sequence: Synthetic oligonucleotide"
ttcggaatcgcaggaagccca

SEQ ID NO: 30616 - DNA, 21 bp, Artificial Sequence
  source: /note="Description of Artificial Sequence: Synthetic oligonucleotide"
ttcggaaaaatcagcatgaca

SEQ ID NO: 30617 - DNA, 21 bp, Artificial Sequence
  source: /note="Description of Artificial Sequence: Synthetic oligonucleotide"
ttcggactcagcccactccca

SEQ ID NO: 30618 - DNA, 21 bp, Artificial Sequence
  source: /note="Description of Artificial Sequence: Synthetic oligonucleotide"
ttcggactcagcagcgcagca

SEQ ID NO: 30619 - DNA, 21 bp, Artificial Sequence
  source: /note="Description of Artificial Sequence: Synthetic oligonucleotide"
ttcggactcacaagaccagaa

SEQ ID NO: 30620 - DNA, 21 bp, Artificial Sequence
  source: /note="Description of Artificial Sequence: Synthetic oligonucleotide"
ttcggaaacagactcagcaac

SEQ ID NO: 30621 - DNA, 21 bp, Artificial Sequence
  source: /note="Description of Artificial Sequence: Synthetic oligonucleotide"
ttcggaccaatgctcctcgga

SEQ ID NO: 30622 - DNA, 21 bp, Artificial Sequence
  source: /note="Description of Artificial Sequence: Synthetic oligonucleotide"
ttcggaccaaacaaagcagac

SEQ ID NO: 30623 - DNA, 21 bp, Artificial Sequence
  source: /note="Description of Artificial Sequence: Synthetic oligonucleotide"
ttcggaccaccaagcggattc

SEQ ID NO: 30624 - DNA, 21 bp, Artificial Sequence
  source: /note="Description of Artificial Sequence: Synthetic oligonucleotide"
ttcggacaacacgcagtcctc

SEQ ID NO: 30625 - DNA, 21 bp, Artificial Sequence
  source: /note="Description of Artificial Sequence: Synthetic oligonucleotide"
ttcggacaaaaacacacagaa

SEQ ID NO: 30626 - DNA, 21 bp, Artificial Sequence
  source: /note="Description of Artificial Sequence: Synthetic oligonucleotide"
ttcggacaaaacagagtcaca

SEQ ID NO: 30627 - DNA, 21 bp, Artificial Sequence
  source: /note="Description of Artificial Sequence: Synthetic oligonucleotide"
ttcggacaaacagcactcgga

SEQ ID NO: 30628 - DNA, 21 bp, Artificial Sequence
  source: /note="Description of Artificial Sequence: Synthetic oligonucleotide"
ttcggaagattcccaacagaa

SEQ ID NO: 30629 - DNA, 21 bp, Artificial Sequence
  source: /note="Description of Artificial Sequence: Synthetic oligonucleotide"
ttcggaagaacaccatacagc

SEQ ID NO: 30630 - DNA, 21 bp, Artificial Sequence
  source: /note="Description of Artificial Sequence: Synthetic oligonucleotide"
ttcggaagcgacacactcatc

SEQ ID NO: 30631 - DNA, 21 bp, Artificial Sequence
  source: /note="Description of Artificial Sequence: Synthetic oligonucleotide"
ttcggaagccacggagaaaga

SEQ ID NO: 30632 - DNA, 21 bp, Artificial Sequence
  source: /note="Description of Artificial Sequence: Synthetic oligonucleotide"
ttcggaacaggatacgcagga

SEQ ID NO: 30633 - DNA, 21 bp, Artificial Sequence
  source: /note="Description of Artificial Sequence: Synthetic oligonucleotide"
ttcggaacaagaatggaacca

SEQ ID NO: 30634 - DNA, 21 bp, Artificial Sequence
  source: /note="Description of Artificial Sequence: Synthetic oligonucleotide"
ttcggaacaagcgaagacgtc

SEQ ID NO: 30635 - DNA, 21 bp, Artificial Sequence
  source: /note="Description of Artificial Sequence: Synthetic oligonucleotide"
ttcggaacaacaagaatggca

SEQ ID NO: 30636 - DNA, 21 bp, Artificial Sequence
  source: /note="Description of Artificial Sequence: Synthetic oligonucleotide"
ttcggaacagtcagaccaagc

SEQ ID NO: 30637 - DNA, 21 bp, Artificial Sequence
  source: /note="Description of Artificial Sequence: Synthetic oligonucleotide"
ttcggagtccaaaaaatcaca

SEQ ID NO: 30638 - DNA, 21 bp, Artificial Sequence
  source: /note="Description of Artificial Sequence: Synthetic oligonucleotide"
ttccacgcaagccacctcgga

SEQ ID NO: 30639 - DNA, 21 bp, Artificial Sequence
  source: /note="Description of Artificial Sequence: Synthetic oligonucleotide"
ttccacgacccatacatctgg

SEQ ID NO: 30640 - DNA, 21 bp, Artificial Sequence
  source: /note="Description of Artificial Sequence: Synthetic oligonucleotide"
ttccacggactcacagtcgca

SEQ ID NO: 30641 - DNA, 21 bp, Artificial Sequence
  source: /note="Description of Artificial Sequence: Synthetic oligonucleotide"
ttccacggaacaagcctcgga

SEQ ID NO: 30642 - DNA, 21 bp, Artificial Sequence
  source: /note="Description of Artificial Sequence: Synthetic oligonucleotide"
ttccacctcccaccagaactc

SEQ ID NO: 30643 - DNA, 21 bp, Artificial Sequence
  source: /note="Description of Artificial Sequence: Synthetic oligonucleotide"
ttccacctcagcagcgcaagc

SEQ ID NO: 30644 - DNA, 21 bp, Artificial Sequence
  source: /note="Description of Artificial Sequence: Synthetic oligonucleotide"
ttccacccagcaagcgtcaac

SEQ ID NO: 30645 - DNA, 21 bp, Artificial Sequence
  source: /note="Description of Artificial Sequence: Synthetic oligonucleotide"
ttccacccacacagcccacca

SEQ ID NO: 30646 - DNA, 21 bp, Artificial Sequence
  source: /note="Description of Artificial Sequence: Synthetic oligonucleotide"
ttccaccaaagaagccaaagc

SEQ ID NO: 30647 - DNA, 21 bp, Artificial Sequence
  source: /note="Description of Artificial Sequence: Synthetic oligonucleotide"
ttccacagaaacgtcgcaaac

SEQ ID NO: 30648 - DNA, 21 bp, Artificial Sequence
  source: /note="Description of Artificial Sequence: Synthetic oligonucleotide"
ttccacacagcaaacacagaa

SEQ ID NO: 30649 - DNA, 21 bp, Artificial Sequence
  source: /note="Description of Artificial Sequence: Synthetic oligonucleotide"
ttcatcgaccacagcatcgca

SEQ ID NO: 30650 - DNA, 21 bp, Artificial Sequence
  source: /note="Description of Artificial Sequence: Synthetic oligonucleotide"
ttcatcggaaacgcaacacaa

SEQ ID NO: 30651 - DNA, 21 bp, Artificial Sequence
  source: /note="Description of Artificial Sequence: Synthetic oligonucleotide"
ttcatcggaacagcaagccaa

SEQ ID NO: 30652 - DNA, 21 bp, Artificial Sequence
  source: /note="Description of Artificial Sequence: Synthetic oligonucleotide"
ttcatcggatacccacaagga

SEQ ID NO: 30653 - DNA, 21 bp, Artificial Sequence
  source: /note="Description of Artificial Sequence: Synthetic oligonucleotide"
ttcatcccaagcgtcagcgtc

SEQ ID NO: 30654 - DNA, 21 bp, Artificial Sequence
  source: /note="Description of Artificial Sequence: Synthetic oligonucleotide"
ttcatccaagacaaacacgtc

SEQ ID NO: 30655 - DNA, 21 bp, Artificial Sequence
  source: /note="Description of Artificial Sequence: Synthetic oligonucleotide"
ttcatcagacacgaaagcgtc

SEQ ID NO: 30656 - DNA, 21 bp, Artificial Sequence
  source: /note="Description of Artificial Sequence: Synthetic oligonucleotide"
ttcatcagaccagacctcgac

SEQ ID NO: 30657 - DNA, 21 bp, Artificial Sequence
  source: /note="Description of Artificial Sequence: Synthetic oligonucleotide"
ttcatcacaggagcactcgga

SEQ ID NO: 30658 - DNA, 21 bp, Artificial Sequence
  source: /note="Description of Artificial Sequence: Synthetic oligonucleotide"
ttcaaagcatacgacaacatc

SEQ ID NO: 30659 - DNA, 21 bp, Artificial Sequence
  source: /note="Description of Artificial Sequence: Synthetic oligonucleotide"
ttcaaagactggttcgaagac

SEQ ID NO: 30660 - DNA, 21 bp, Artificial Sequence
  source: /note="Description of Artificial Sequence: Synthetic oligonucleotide"
ttcaaagaaagctggccagca

SEQ ID NO: 30661 - DNA, 21 bp, Artificial Sequence
  source: /note="Description of Artificial Sequence: Synthetic oligonucleotide"
ttcaaagaaacaagcaaccac

SEQ ID NO: 30662 - DNA, 21 bp, Artificial Sequence
  source: /note="Description of Artificial Sequence: Synthetic oligonucleotide"
ttcaaaggaatgggagtcgga

SEQ ID NO: 30663 - DNA, 21 bp, Artificial Sequence
  source: /note="Description of Artificial Sequence: Synthetic oligonucleotide"
ttcaaacacccaatggacgga

SEQ ID NO: 30664 - DNA, 21 bp, Artificial Sequence
  source: /note="Description of Artificial Sequence: Synthetic oligonucleotide"
ttcaaactcggaccaccagaa

SEQ ID NO: 30665 - DNA, 21 bp, Artificial Sequence
  source: /note="Description of Artificial Sequence: Synthetic oligonucleotide"
ttcaaactcgtcacaagagaa

SEQ ID NO: 30666 - DNA, 21 bp, Artificial Sequence
  source: /note="Description of Artificial Sequence: Synthetic oligonucleotide"
ttcaaaaacggaacaccacca

SEQ ID NO: 30667 - DNA, 21 bp, Artificial Sequence
  source: /note="Description of Artificial Sequence: Synthetic oligonucleotide"
ttcaaaaacgtcctcggaaca

SEQ ID NO: 30668 - DNA, 21 bp, Artificial Sequence
  source: /note="Description of Artificial Sequence: Synthetic oligonucleotide"
ttcaaaccagcaaacaacgtc

SEQ ID NO: 30669 - DNA, 21 bp, Artificial Sequence
  source: /note="Description of Artificial Sequence: Synthetic oligonucleotide"
ttcaaaccaccaccaatgagc

SEQ ID NO: 30670 - DNA, 21 bp, Artificial Sequence
  source: /note="Description of Artificial Sequence: Synthetic oligonucleotide"
ttcaaacaaccaccatacgtc

SEQ ID NO: 30671 - DNA, 21 bp, Artificial Sequence
  source: /note="Description of Artificial Sequence: Synthetic oligonucleotide"
ttcaaacaaccatacgcaaga

SEQ ID NO: 30672 - DNA, 21 bp, Artificial Sequence
  source: /note="Description of Artificial Sequence: Synthetic oligonucleotide"
ttcaaaagcgtcggaacaatc

SEQ ID NO: 30673 - DNA, 21 bp, Artificial Sequence
  source: /note="Description of Artificial Sequence: Synthetic oligonucleotide"
ttcaaaacaatggaaagactc

SEQ ID NO: 30674 - DNA, 21 bp, Artificial Sequence
  source: /note="Description of Artificial Sequence: Synthetic oligonucleotide"
ttcaaagtccacgcaagcagc

SEQ ID NO: 30675 - DNA, 21 bp, Artificial Sequence
  source: /note="Description of Artificial Sequence: Synthetic oligonucleotide"
ttcctcgcaaaactccaacca

SEQ ID NO: 30676 - DNA, 21 bp, Artificial Sequence
  source: /note="Description of Artificial Sequence: Synthetic oligonucleotide"
ttcctcgcactcgaaagacaa

SEQ ID NO: 30677 - DNA, 21 bp, Artificial Sequence
  source: /note="Description of Artificial Sequence: Synthetic oligonucleotide"
ttcctcgcaagcctcaacgac

SEQ ID NO: 30678 - DNA, 21 bp, Artificial Sequence
  source: /note="Description of Artificial Sequence: Synthetic oligonucleotide"
ttcctcgacaacagagcagtc

SEQ ID NO: 30679 - DNA, 21 bp, Artificial Sequence
  source: /note="Description of Artificial Sequence: Synthetic oligonucleotide"
ttcctcggagcagcaggacaa

SEQ ID NO: 30680 - DNA, 21 bp, Artificial Sequence
  source: /note="Description of Artificial Sequence: Synthetic oligonucleotide"
ttcctcggagcacacagcgca

SEQ ID NO: 30681 - DNA, 21 bp, Artificial Sequence
  source: /note="Description of Artificial Sequence: Synthetic oligonucleotide"
ttcctccacgcaatggacctc

SEQ ID NO: 30682 - DNA, 21 bp, Artificial Sequence
  source: /note="Description of Artificial Sequence: Synthetic oligonucleotide"
ttcctccacggagaaacagga

SEQ ID NO: 30683 - DNA, 21 bp, Artificial Sequence
  source: /note="Description of Artificial Sequence: Synthetic oligonucleotide"
ttcctcaaaagcaacatcgca

SEQ ID NO: 30684 - DNA, 21 bp, Artificial Sequence
  source: /note="Description of Artificial Sequence: Synthetic oligonucleotide"
ttcctcaaaacagcagtccca

SEQ ID NO: 30685 - DNA, 21 bp, Artificial Sequence
  source: /note="Description of Artificial Sequence: Synthetic oligonucleotide"
ttcctcaaaacagacacagga

SEQ ID NO: 30686 - DNA, 21 bp, Artificial Sequence
  source: /note="Description of Artificial Sequence: Synthetic oligonucleotide"
ttcctcccagaaagaggaagc

SEQ ID NO: 30687 - DNA, 21 bp, Artificial Sequence
  source: /note="Description of Artificial Sequence: Synthetic oligonucleotide"
ttcctcccacaacacagccca

SEQ ID NO: 30688 - DNA, 21 bp, Artificial Sequence
  source: /note="Description of Artificial Sequence: Synthetic oligonucleotide"
ttcctcccaagcggaggagca

SEQ ID NO: 30689 - DNA, 21 bp, Artificial Sequence
  source: /note="Description of Artificial Sequence: Synthetic oligonucleotide"
ttcctcagagaaaacgcaagc

SEQ ID NO: 30690 - DNA, 21 bp, Artificial Sequence
  source: /note="Description of Artificial Sequence: Synthetic oligonucleotide"
ttcctcagaatcccagacgac

SEQ ID NO: 30691 - DNA, 21 bp, Artificial Sequence
  source: /note="Description of Artificial Sequence: Synthetic oligonucleotide"
ttcctcagcaaaccactcagc

SEQ ID NO: 30692 - DNA, 21 bp, Artificial Sequence
  source: /note="Description of Artificial Sequence: Synthetic oligonucleotide"
ttcctcagcaacagcaacgca

SEQ ID NO: 30693 - DNA, 21 bp, Artificial Sequence
  source: /note="Description of Artificial Sequence: Synthetic oligonucleotide"
ttcctcagcccaaacctcatc

SEQ ID NO: 30694 - DNA, 21 bp, Artificial Sequence
  source: /note="Description of Artificial Sequence: Synthetic oligonucleotide"
ttcctcagcagcgacggaaga

SEQ ID NO: 30695 - DNA, 21 bp, Artificial Sequence
  source: /note="Description of Artificial Sequence: Synthetic oligonucleotide"
ttcctcagcgtcccagaaaca

SEQ ID NO: 30696 - DNA, 21 bp, Artificial Sequence
  source: /note="Description of Artificial Sequence: Synthetic oligonucleotide"
ttcctcacagcaggaatgcca

SEQ ID NO: 30697 - DNA, 21 bp, Artificial Sequence
  source: /note="Description of Artificial Sequence: Synthetic oligonucleotide"
ttcctcacaagcgcaaaaagc

SEQ ID NO: 30698 - DNA, 21 bp, Artificial Sequence
  source: /note="Description of Artificial Sequence: Synthetic oligonucleotide"
ttcctcacaacaggagtcgac

SEQ ID NO: 30699 - DNA, 21 bp, Artificial Sequence
  source: /note="Description of Artificial Sequence: Synthetic oligonucleotide"
ttcatgttcaacgacagccca

SEQ ID NO: 30700 - DNA, 21 bp, Artificial Sequence
  source: /note="Description of Artificial Sequence: Synthetic oligonucleotide"
ttcatgggaacagtcgtcaac

SEQ ID NO: 30701 - DNA, 21 bp, Artificial Sequence
  source: /note="Description of Artificial Sequence: Synthetic oligonucleotide"
ttcatgcaccaacaaggactc

SEQ ID NO: 30702 - DNA, 21 bp, Artificial Sequence
  source: /note="Description of Artificial Sequence: Synthetic oligonucleotide"
ttcatgctcagagacgcaaca

SEQ ID NO: 30703 - DNA, 21 bp, Artificial Sequence
  source: /note="Description of Artificial Sequence: Synthetic oligonucleotide"
ttcatgatgacaggaacagca

SEQ ID NO: 30704 - DNA, 21 bp, Artificial Sequence
  source: /note="Description of Artificial Sequence: Synthetic oligonucleotide"
ttcatgccaaaaacaagccca

SEQ ID NO: 30705 - DNA, 21 bp, Artificial Sequence
  source: /note="Description of Artificial Sequence: Synthetic oligonucleotide"
ttcatgagaagcacacaaagc

SEQ ID NO: 30706 - DNA, 21 bp, Artificial Sequence
  source: /note="Description of Artificial Sequence: Synthetic oligonucleotide"
ttcatgagcagaggactcgca

SEQ ID NO: 30707 - DNA, 21 bp, Artificial Sequence
  source: /note="Description of Artificial Sequence: Synthetic oligonucleotide"
ttcatgacagaaagagcagca

SEQ ID NO: 30708 - DNA, 21 bp, Artificial Sequence
  source: /note="Description of Artificial Sequence: Synthetic oligonucleotide"
ttcatgacaaacctcagcgga

SEQ ID NO: 30709 - DNA, 21 bp, Artificial Sequence
  source: /note="Description of Artificial Sequence: Synthetic oligonucleotide"
ttcatgacaagcggagacctc

SEQ ID NO: 30710 - DNA, 21 bp, Artificial Sequence
  source: /note="Description of Artificial Sequence: Synthetic oligonucleotide"
ttcatggtcgacccagtcaac

SEQ ID NO: 30711 - DNA, 21 bp, Artificial Sequence
  source: /note="Description of Artificial Sequence: Synthetic oligonucleotide"
ttcatggtcagcgcaccactc

SEQ ID NO: 30712 - DNA, 21 bp, Artificial Sequence
  source: /note="Description of Artificial Sequence: Synthetic oligonucleotide"
ttcatgtacggaaacggagtc

SEQ ID NO: 30713 - DNA, 21 bp, Artificial Sequence
  source: /note="Description of Artificial Sequence: Synthetic oligonucleotide"
ttcaacgcaatccacgtcagc

SEQ ID NO: 30714 - DNA, 21 bp, Artificial Sequence
  source: /note="Description of Artificial Sequence: Synthetic oligonucleotide"
ttcaacgaactcagcggactc

SEQ ID NO: 30715 - DNA, 21 bp, Artificial Sequence
  source: /note="Description of Artificial Sequence: Synthetic oligonucleotide"
ttcaacttcaacaaaatggac

SEQ ID NO: 30716 - DNA, 21 bp, Artificial Sequence
  source: /note="Description of Artificial Sequence: Synthetic oligonucleotide"
ttcaacggagacagcccagca

SEQ ID NO: 30717 - DNA, 21 bp, Artificial Sequence
  source: /note="Description of Artificial Sequence: Synthetic oligonucleotide"
ttcaacggaccatacgaactc

SEQ ID NO: 30718 - DNA, 21 bp, Artificial Sequence
  source: /note="Description of Artificial Sequence: Synthetic oligonucleotide"
ttcaacctcagcacaagcgca

SEQ ID NO: 30719 - DNA, 21 bp, Artificial Sequence
  source: /note="Description of Artificial Sequence: Synthetic oligonucleotide"
ttcaacccaacagtcagagaa

SEQ ID NO: 30720 - DNA, 21 bp, Artificial Sequence
  source: /note="Description of Artificial Sequence: Synthetic oligonucleotide"
ttcaacagaccagtcacaaca

SEQ ID NO: 30721 - DNA, 21 bp, Artificial Sequence
  source: /note="Description of Artificial Sequence: Synthetic oligonucleotide"
ttcaacagcgacagcaacagc

SEQ ID NO: 30722 - DNA, 21 bp, Artificial Sequence
  source: /note="Description of Artificial Sequence: Synthetic oligonucleotide"
ttcaacagcagcccagacctc

SEQ ID NO: 30723 - DNA, 21 bp, Artificial Sequence
  source: /note="Description of Artificial Sequence: Synthetic oligonucleotide"
ttcaacacaccaacaaaagtc

SEQ ID NO: 30724 - DNA, 21 bp, Artificial Sequence
  source: /note="Description of Artificial Sequence: Synthetic oligonucleotide"
ttcaacgtcatgcaagaaaga

SEQ ID NO: 30725 - DNA, 21 bp, Artificial Sequence
  source: /note="Description of Artificial Sequence: Synthetic oligonucleotide"
ttcccagcactcagcggagga

SEQ ID NO: 30726 - DNA, 21 bp, Artificial Sequence
  source: /note="Description of Artificial Sequence: Synthetic oligonucleotide"
ttcccagcagtcaacgtccca

SEQ ID NO: 30727 - DNA, 21 bp, Artificial Sequence
  source: /note="Description of Artificial Sequence: Synthetic oligonucleotide"
ttcccagaaagaggaatggtc

SEQ ID NO: 30728 - DNA, 21 bp, Artificial Sequence
  source: /note="Description of Artificial Sequence: Synthetic oligonucleotide"
ttcccattcaacagcggaagc

SEQ ID NO: 30729 - DNA, 21 bp, Artificial Sequence
  source: /note="Description of Artificial Sequence: Synthetic oligonucleotide"
ttcccaggattcccaagcaaa

SEQ ID NO: 30730 - DNA, 21 bp, Artificial Sequence
  source: /note="Description of Artificial Sequence: Synthetic oligonucleotide"
ttcccaggaagcgacagcctc

SEQ ID NO: 30731 - DNA, 21 bp, Artificial Sequence
  source: /note="Description of Artificial Sequence: Synthetic oligonucleotide"
ttcccacacacactcagcgaa

SEQ ID NO: 30732 - DNA, 21 bp, Artificial Sequence
  source: /note="Description of Artificial Sequence: Synthetic oligonucleotide"
ttcccaaaaggaagcacacca

SEQ ID NO: 30733 - DNA, 21 bp, Artificial Sequence
  source: /note="Description of Artificial Sequence: Synthetic oligonucleotide"
ttcccaaaaacagacgacaca

SEQ ID NO: 30734 - DNA, 21 bp, Artificial Sequence
  source: /note="Description of Artificial Sequence: Synthetic oligonucleotide"
ttcccaaaatacgcaatcgca

SEQ ID NO: 30735 - DNA, 21 bp, Artificial Sequence
  source: /note="Description of Artificial Sequence: Synthetic oligonucleotide"
ttcccactcatgagcagcaac

SEQ ID NO: 30736 - DNA, 21 bp, Artificial Sequence
  source: /note="Description of Artificial Sequence: Synthetic oligonucleotide"
ttcccactcagcgacccatac

SEQ ID NO: 30737 - DNA, 21 bp, Artificial Sequence
  source: /note="Description of Artificial Sequence: Synthetic oligonucleotide"
ttcccactcagccaacaagca

SEQ ID NO: 30738 - DNA, 21 bp, Artificial Sequence
  source: /note="Description of Artificial Sequence: Synthetic oligonucleotide"
ttcccaatggcaaaaccatac

SEQ ID NO: 30739 - DNA, 21 bp, Artificial Sequence
  source: /note="Description of Artificial Sequence: Synthetic oligonucleotide"
ttcccaatgagaggagcacca

SEQ ID NO: 30740 - DNA, 21 bp, Artificial Sequence
  source: /note="Description of Artificial Sequence: Synthetic oligonucleotide"
ttcccaatgacaaacccagca

SEQ ID NO: 30741 - DNA, 21 bp, Artificial Sequence
  source: /note="Description of Artificial Sequence: Synthetic oligonucleotide"
ttcccaaacgcacaactcgtc

SEQ ID NO: 30742 - DNA, 21 bp, Artificial Sequence
  source: /note="Description of Artificial Sequence: Synthetic oligonucleotide"
ttcccaaacgacctcccactc

SEQ ID NO: 30743 - DNA, 21 bp, Artificial Sequence
  source: /note="Description of Artificial Sequence: Synthetic oligonucleotide"
ttcccaaacatgagcagcgtc

SEQ ID NO: 30744 - DNA, 21 bp, Artificial Sequence
  source: /note="Description of Artificial Sequence: Synthetic oligonucleotide"
ttcccaaacagattcgaagca

SEQ ID NO: 30745 - DNA, 21 bp, Artificial Sequence
  source: /note="Description of Artificial Sequence: Synthetic oligonucleotide"
ttcccaccaggagtcagacca

SEQ ID NO: 30746 - DNA, 21 bp, Artificial Sequence
  source: /note="Description of Artificial Sequence: Synthetic oligonucleotide"
ttcccaccaagagacacacca

SEQ ID NO: 30747 - DNA, 21 bp, Artificial Sequence
  source: /note="Description of Artificial Sequence: Synthetic oligonucleotide"
ttcccaccaagctgcgcaaac

SEQ ID NO: 30748 - DNA, 21 bp, Artificial Sequence
  source: /note="Description of Artificial Sequence: Synthetic oligonucleotide"
ttcccaccaagcctcagcgca

SEQ ID NO: 30749 - DNA, 21 bp, Artificial Sequence
  source: /note="Description of Artificial Sequence: Synthetic oligonucleotide"
ttcccaccaagcagcctccca

SEQ ID NO: 30750 - DNA, 21 bp, Artificial Sequence
  source: /note="Description of Artificial Sequence: Synthetic oligonucleotide"
ttcccaccaacaaacagcttc

SEQ ID NO: 30751 - DNA, 21 bp, Artificial Sequence
  source: /note="Description of Artificial Sequence: Synthetic oligonucleotide"
ttcccacaaatcacactcaac

SEQ ID NO: 30752 - DNA, 21 bp, Artificial Sequence
  source: /note="Description of Artificial Sequence: Synthetic oligonucleotide"
ttcccacaaaaagaaggaaca

SEQ ID NO: 30753 - DNA, 21 bp, Artificial Sequence
  source: /note="Description of Artificial Sequence: Synthetic oligonucleotide"
ttcccacaaccagcagacatg

SEQ ID NO: 30754 - DNA, 21 bp, Artificial Sequence
  source: /note="Description of Artificial Sequence: Synthetic oligonucleotide"
ttcccaagagcaatcgacgca

SEQ ID NO: 30755 - DNA, 21 bp, Artificial Sequence
  source: /note="Description of Artificial Sequence: Synthetic oligonucleotide"
ttcccaagaggagcagtcctc

SEQ ID NO: 30756 - DNA, 21 bp, Artificial Sequence
  source: /note="Description of Artificial Sequence: Synthetic oligonucleotide"
ttcccaagaccacaactcgga

SEQ ID NO: 30757 - DNA, 21 bp, Artificial Sequence
  source: /note="Description of Artificial Sequence: Synthetic oligonucleotide"
ttcccaagcaacccagcacac

SEQ ID NO: 30758 - DNA, 21 bp, Artificial Sequence
  source: /note="Description of Artificial Sequence: Synthetic oligonucleotide"
ttcccaagcagccaacaaaca

SEQ ID NO: 30759 - DNA, 21 bp, Artificial Sequence
  source: /note="Description of Artificial Sequence: Synthetic oligonucleotide"
ttcccaagcagcagactcagc

SEQ ID NO: 30760 - DNA, 21 bp, Artificial Sequence
  source: /note="Description of Artificial Sequence: Synthetic oligonucleotide"
ttcccaagcacaacactccca

SEQ ID NO: 30761 - DNA, 21 bp, Artificial Sequence
  source: /note="Description of Artificial Sequence: Synthetic oligonucleotide"
ttcccaacagactacgtccca

SEQ ID NO: 30762 - DNA, 21 bp, Artificial Sequence
  source: /note="Description of Artificial Sequence: Synthetic oligonucleotide"
ttcccaacaaaaggattcgtc

SEQ ID NO: 30763 - DNA, 21 bp, Artificial Sequence
  source: /note="Description of Artificial Sequence: Synthetic oligonucleotide"
ttcccaacaagcacaagcagc

SEQ ID NO: 30764 - DNA, 21 bp, Artificial Sequence
  source: /note="Description of Artificial Sequence: Synthetic oligonucleotide"
ttcccaacaagcacaacacca

SEQ ID NO: 30765 - DNA, 21 bp, Artificial Sequence
  source: /note="Description of Artificial Sequence: Synthetic oligonucleotide"
ttcccagtcgcacaacacgac

SEQ ID NO: 30766 - DNA, 21 bp, Artificial Sequence
  source: /note="Description of Artificial Sequence: Synthetic oligonucleotide"
ttcccagtcgacggaagacaa

SEQ ID NO: 30767 - DNA, 21 bp, Artificial Sequence
  source: /note="Description of Artificial Sequence: Synthetic oligonucleotide"
ttcccagtcggaaacagactc

SEQ ID NO: 30768 - DNA, 21 bp, Artificial Sequence
  source: /note="Description of Artificial Sequence: Synthetic oligonucleotide"
ttcccagtcggacaactcgca

SEQ ID NO: 30769 - DNA, 21 bp, Artificial Sequence
  source: /note="Description of Artificial Sequence: Synthetic oligonucleotide"
ttcccagtcaaaacaatggtc

SEQ ID NO: 30770 - DNA, 21 bp, Artificial Sequence
  source: /note="Description of Artificial Sequence: Synthetic oligonucleotide"
ttcccagtcagcgcaagagac

SEQ ID NO: 30771 - DNA, 21 bp, Artificial Sequence
  source: /note="Description of Artificial Sequence: Synthetic oligonucleotide"
ttccaagcagcaccagaccac

SEQ ID NO: 30772 - DNA, 21 bp, Artificial Sequence
  source: /note="Description of Artificial Sequence: Synthetic oligonucleotide"
ttccaagcaggaaaagcagtc

SEQ ID NO: 30773 - DNA, 21 bp, Artificial Sequence
  source: /note="Description of Artificial Sequence: Synthetic oligonucleotide"
ttccaaggagcaatcagcaga

SEQ ID NO: 30774 - DNA, 21 bp, Artificial Sequence
  source: /note="Description of Artificial Sequence: Synthetic oligonucleotide"
ttccaaggactcagactcgga

SEQ ID NO: 30775 - DNA, 21 bp, Artificial Sequence
  source: /note="Description of Artificial Sequence: Synthetic oligonucleotide"
ttccaaggaagcgtcccagaa

SEQ ID NO: 30776 - DNA, 21 bp, Artificial Sequence
  source: /note="Description of Artificial Sequence: Synthetic oligonucleotide"
ttccaaatcacagcacaagga

SEQ ID NO: 30777 - DNA, 21 bp, Artificial Sequence
  source: /note="Description of Artificial Sequence: Synthetic oligonucleotide"
ttccaaaaaagccacgcagga

SEQ ID NO: 30778 - DNA, 21 bp, Artificial Sequence
  source: /note="Description of Artificial Sequence: Synthetic oligonucleotide"
ttccaaaacccacaaagcagc

SEQ ID NO: 30779 - DNA, 21 bp, Artificial Sequence
  source: /note="Description of Artificial Sequence: Synthetic oligonucleotide"
ttccaaaaccaaggaccactc

SEQ ID NO: 30780 - DNA, 21 bp, Artificial Sequence
  source: /note="Description of Artificial Sequence: Synthetic oligonucleotide"
ttccaacaaacaggaccaaga

SEQ ID NO: 30781 - DNA, 21 bp, Artificial Sequence
  source: /note="Description of Artificial Sequence: Synthetic oligonucleotide"
ttccaaagagcaacactccaa

SEQ ID NO: 30782 - DNA, 21 bp, Artificial Sequence
  source: /note="Description of Artificial Sequence: Synthetic oligonucleotide"
ttccaaagcgcaacagtcgca

SEQ ID NO: 30783 - DNA, 21 bp, Artificial Sequence
  source: /note="Description of Artificial Sequence: Synthetic oligonucleotide"
ttccaaacaccaagcggagac

SEQ ID NO: 30784 - DNA, 21 bp, Artificial Sequence
  source: /note="Description of Artificial Sequence: Synthetic oligonucleotide"
ttccaagtcgtcggaagccca

SEQ ID NO: 30785 - DNA, 21 bp, Artificial Sequence
  source: /note="Description of Artificial Sequence: Synthetic oligonucleotide"
ttccaatacgaaccagcaatc

SEQ ID NO: 30786 - DNA, 21 bp, Artificial Sequence
  source: /note="Description of Artificial Sequence: Synthetic oligonucleotide"
ttcagagcagacctcctcaac

SEQ ID NO: 30787 - DNA, 21 bp, Artificial Sequence
  source: /note="Description of Artificial Sequence: Synthetic oligonucleotide"
ttcagagcaatcggaagcgga

SEQ ID NO: 30788 - DNA, 21 bp, Artificial Sequence
  source: /note="Description of Artificial Sequence: Synthetic oligonucleotide"
ttcagagcactcgtcgaacca

SEQ ID NO: 30789 - DNA, 21 bp, Artificial Sequence
  source: /note="Description of Artificial Sequence: Synthetic oligonucleotide"
ttcagagacgaacaaccaagc

SEQ ID NO: 30790 - DNA, 21 bp, Artificial Sequence
  source: /note="Description of Artificial Sequence: Synthetic oligonucleotide"
ttcagagaccaagcagacgga

SEQ ID NO: 30791 - DNA, 21 bp, Artificial Sequence
  source: /note="Description of Artificial Sequence: Synthetic oligonucleotide"
ttcagagacagcccaccaagc

SEQ ID NO: 30792 - DNA, 21 bp, Artificial Sequence
  source: /note="Description of Artificial Sequence: Synthetic oligonucleotide"
ttcagagaagaaccacaaaca

SEQ ID NO: 30793 - DNA, 21 bp, Artificial Sequence
  source: /note="Description of Artificial Sequence: Synthetic oligonucleotide"
ttcagaggaccaagcagcagc

SEQ ID NO: 30794 - DNA, 21 bp, Artificial Sequence
  source: /note="Description of Artificial Sequence: Synthetic oligonucleotide"
ttcagacacgcagacgcagtc

SEQ ID NO: 30795 - DNA, 21 bp, Artificial Sequence
  source: /note="Description of Artificial Sequence: Synthetic oligonucleotide"
ttcagacacgaccacagcgtc

SEQ ID NO: 30796 - DNA, 21 bp, Artificial Sequence
  source: /note="Description of Artificial Sequence: Synthetic oligonucleotide"
ttcagactccacagcacaagc

SEQ ID NO: 30797 - DNA, 21 bp, Artificial Sequence
  source: /note="Description of Artificial Sequence: Synthetic oligonucleotide"
ttcagactcccacacgaaaca

SEQ ID NO: 30798 - DNA, 21 bp, Artificial Sequence
  source: /note="Description of Artificial Sequence: Synthetic oligonucleotide"
ttcagaatgggagaagcacca

SEQ ID NO: 30799 - DNA, 21 bp, Artificial Sequence
  source: /note="Description of Artificial Sequence: Synthetic oligonucleotide"
ttcagaatgcaaaacgcagca

SEQ ID NO: 30800 - DNA, 21 bp, Artificial Sequence
  source: /note="Description of Artificial Sequence: Synthetic oligonucleotide"
ttcagaaacggaccagaacca

SEQ ID NO: 30801 - DNA, 21 bp, Artificial Sequence
  source: /note="Description of Artificial Sequence: Synthetic oligonucleotide"
ttcagaaacaacgtcagcctc

SEQ ID NO: 30802 - DNA, 21 bp, Artificial Sequence
  source: /note="Description of Artificial Sequence: Synthetic oligonucleotide"
ttcagaccactcgcactcgaa

SEQ ID NO: 30803 - DNA, 21 bp, Artificial Sequence
  source: /note="Description of Artificial Sequence: Synthetic oligonucleotide"
ttcagaccactcagcacacca

SEQ ID NO: 30804 - DNA, 21 bp, Artificial Sequence
  source: /note="Description of Artificial Sequence: Synthetic oligonucleotide"
ttcagaccaccagcactcagc

SEQ ID NO: 30805 - DNA, 21 bp, Artificial Sequence
  source: /note="Description of Artificial Sequence: Synthetic oligonucleotide"
ttcagaccacaagacacaatg

SEQ ID NO: 30806 - DNA, 21 bp, Artificial Sequence
  source: /note="Description of Artificial Sequence: Synthetic oligonucleotide"
ttcagacaaacaccaaaccac

SEQ ID NO: 30807 - DNA, 21 bp, Artificial Sequence
  source: /note="Description of Artificial Sequence: Synthetic oligonucleotide"
ttcagaagcgacagccacaac

SEQ ID NO: 30808 - DNA, 21 bp, Artificial Sequence
  source: /note="Description of Artificial Sequence: Synthetic oligonucleotide"
ttcagaagcggactcgcaatc

SEQ ID NO: 30809 - DNA, 21 bp, Artificial Sequence
  source: /note="Description of Artificial Sequence: Synthetic oligonucleotide"
ttcagaagcggactcgaatac

SEQ ID NO: 30810 - DNA, 21 bp, Artificial Sequence
  source: /note="Description of Artificial Sequence: Synthetic oligonucleotide"
ttcagaagcggaatggtcgca

SEQ ID NO: 30811 - DNA, 21 bp, Artificial Sequence
  source: /note="Description of Artificial Sequence: Synthetic oligonucleotide"
ttcagaagcaaaatcgacgca

SEQ ID NO: 30812 - DNA, 21 bp, Artificial Sequence
  source: /note="Description of Artificial Sequence: Synthetic oligonucleotide"
ttcagaagcccagcaggactc

SEQ ID NO: 30813 - DNA, 21 bp, Artificial Sequence
  source: /note="Description of Artificial Sequence: Synthetic oligonucleotide"
ttcagaagcacagaaaacaac

SEQ ID NO: 30814 - DNA, 21 bp, Artificial Sequence
  source: /note="Description of Artificial Sequence: Synthetic oligonucleotide"
ttcagaacaccacacagcgaa

SEQ ID NO: 30815 - DNA, 21 bp, Artificial Sequence
  source: /note="Description of Artificial Sequence: Synthetic oligonucleotide"
ttcagaacaagcacagaagga

SEQ ID NO: 30816 - DNA, 21 bp, Artificial Sequence
  source: /note="Description of Artificial Sequence: Synthetic oligonucleotide"
ttcagagtcccagacgcagac

SEQ ID NO: 30817 - DNA, 21 bp, Artificial Sequence
  source: /note="Description of Artificial Sequence: Synthetic oligonucleotide"
ttcagcgcagacgtcgacgga

SEQ ID NO: 30818 - DNA, 21 bp, Artificial Sequence
  source: /note="Description of Artificial Sequence: Synthetic oligonucleotide"
ttcagcgcaagaggaagcgga

SEQ ID NO: 30819 - DNA, 21 bp, Artificial Sequence
  source: /note="Description of Artificial Sequence: Synthetic oligonucleotide"
ttcagcgacggagaaagcctc

SEQ ID NO: 30820 - DNA, 21 bp, Artificial Sequence
  source: /note="Description of Artificial Sequence: Synthetic oligonucleotide"
ttcagcgaccacacagcacac

SEQ ID NO: 30821 - DNA, 21 bp, Artificial Sequence
  source: /note="Description of Artificial Sequence: Synthetic oligonucleotide"
ttcagcgacaacgcactcgac

SEQ ID NO: 30822 - DNA, 21 bp, Artificial Sequence
  source: /note="Description of Artificial Sequence: Synthetic oligonucleotide"
ttcagcgacagaccaggagac

SEQ ID NO: 30823 - DNA, 21 bp, Artificial Sequence
  source: /note="Description of Artificial Sequence: Synthetic oligonucleotide"
ttcagcgaacacgtcagcaaa

SEQ ID NO: 30824 - DNA, 21 bp, Artificial Sequence
  source: /note="Description of Artificial Sequence: Synthetic oligonucleotide"
ttcagcgaaagacacagcgaa

SEQ ID NO: 30825 - DNA, 21 bp, Artificial Sequence
  source: /note="Description of Artificial Sequence: Synthetic oligonucleotide"
ttcagcgaaagcaaaacacca

SEQ ID NO: 30826 - DNA, 21 bp, Artificial Sequence
  source: /note="Description of Artificial Sequence: Synthetic oligonucleotide"
ttcagcgaaacaagcaacatg

SEQ ID NO: 30827 - DNA, 21 bp, Artificial Sequence
  source: /note="Description of Artificial Sequence: Synthetic oligonucleotide"
ttcagcggagaaccactcagc

SEQ ID NO: 30828 - DNA, 21 bp, Artificial Sequence
  source: /note="Description of Artificial Sequence: Synthetic oligonucleotide"
ttcagcggacacaacacaatc

SEQ ID NO: 30829 - DNA, 21 bp, Artificial Sequence
  source: /note="Description of Artificial Sequence: Synthetic oligonucleotide"
ttcagccacccaggagcagca

SEQ ID NO: 30830 - DNA, 21 bp, Artificial Sequence
  source: /note="Description of Artificial Sequence: Synthetic oligonucleotide"
ttcagccacccacacccagca

SEQ ID NO: 30831 - DNA, 21 bp, Artificial Sequence
  source: /note="Description of Artificial Sequence: Synthetic oligonucleotide"
ttcagccacagccaaagcaca

SEQ ID NO: 30832 - DNA, 21 bp, Artificial Sequence
  source: /note="Description of Artificial Sequence: Synthetic oligonucleotide"
ttcagccacagcagcggaaaa

SEQ ID NO: 30833 - DNA, 21 bp, Artificial Sequence
  source: /note="Description of Artificial Sequence: Synthetic oligonucleotide"
ttcagcatcacaccaatcaaa

SEQ ID NO: 30834 - DNA, 21 bp, Artificial Sequence
  source: /note="Description of Artificial Sequence: Synthetic oligonucleotide"
ttcagcctcatgccaagagaa

SEQ ID NO: 30835 - DNA, 21 bp, Artificial Sequence
  source: /note="Description of Artificial Sequence: Synthetic oligonucleotide"
ttcagcctcacagcagacaaa

SEQ ID NO: 30836 - DNA, 21 bp, Artificial Sequence
  source: /note="Description of Artificial Sequence: Synthetic oligonucleotide"
ttcagcatgacagcacaagac

SEQ ID NO: 30837 - DNA, 21 bp, Artificial Sequence
  source: /note="Description of Artificial Sequence: Synthetic oligonucleotide"
ttcagcatgacagtccaccac

SEQ ID NO: 30838 - DNA, 21 bp, Artificial Sequence
  source: /note="Description of Artificial Sequence: Synthetic oligonucleotide"
ttcagcaaccaaatgccaatc

SEQ ID NO: 30839 - DNA, 21 bp, Artificial Sequence
  source: /note="Description of Artificial Sequence: Synthetic oligonucleotide"
ttcagcaacagcggaccattc

SEQ ID NO: 30840 - DNA, 21 bp, Artificial Sequence
  source: /note="Description of Artificial Sequence: Synthetic oligonucleotide"
ttcagcaacacaacaagcctc

SEQ ID NO: 30841 - DNA, 21 bp, Artificial Sequence
  source: /note="Description of Artificial Sequence: Synthetic oligonucleotide"
ttcagcaacacaacaacaaca

SEQ ID NO: 30842 - DNA, 21 bp, Artificial Sequence
  source: /note="Description of Artificial Sequence: Synthetic oligonucleotide"
ttcagcccaggaagcctcgca

SEQ ID NO: 30843 - DNA, 21 bp, Artificial Sequence
  source: /note="Description of Artificial Sequence: Synthetic oligonucleotide"
ttcagcccacacacactccca

SEQ ID NO: 30844 - DNA, 21 bp, Artificial Sequence
  source: /note="Description of Artificial Sequence: Synthetic oligonucleotide"
ttcagcccaatggaagcaagc

SEQ ID NO: 30845 - DNA, 21 bp, Artificial Sequence
  source: /note="Description of Artificial Sequence: Synthetic oligonucleotide"
ttcagcccaaacatcatgaga

SEQ ID NO: 30846 - DNA, 21 bp, Artificial Sequence
  source: /note="Description of Artificial Sequence: Synthetic oligonucleotide"
ttcagcccaagaagcatcgga

SEQ ID NO: 30847 - DNA, 21 bp, Artificial Sequence
  source: /note="Description of Artificial Sequence: Synthetic oligonucleotide"
ttcagcccatacgcagacgaa

SEQ ID NO: 30848 - DNA, 21 bp, Artificial Sequence
  source: /note="Description of Artificial Sequence: Synthetic oligonucleotide"
ttcagccaaccactcagaaac

SEQ ID NO: 30849 - DNA, 21 bp, Artificial Sequence
  source: /note="Description of Artificial Sequence: Synthetic oligonucleotide"
ttcagccaaagcctcccaaca

SEQ ID NO: 30850 - DNA, 21 bp, Artificial Sequence
  source: /note="Description of Artificial Sequence: Synthetic oligonucleotide"
ttcagcagaggaagcggacca

SEQ ID NO: 30851 - DNA, 21 bp, Artificial Sequence
  source: /note="Description of Artificial Sequence: Synthetic oligonucleotide"
ttcagcagactcaacccaagc

SEQ ID NO: 30852 - DNA, 21 bp, Artificial Sequence
  source: /note="Description of Artificial Sequence: Synthetic oligonucleotide"
ttcagcagaagccacatccca

SEQ ID NO: 30853 - DNA, 21 bp, Artificial Sequence
  source: /note="Description of Artificial Sequence: Synthetic oligonucleotide"
ttcagcagaacactcacaagc

SEQ ID NO: 30854 - DNA, 21 bp, Artificial Sequence
  source: /note="Description of Artificial Sequence: Synthetic oligonucleotide"
ttcagcagccacgaaagcagc

SEQ ID NO: 30855 - DNA, 21 bp, Artificial Sequence
  source: /note="Description of Artificial Sequence: Synthetic oligonucleotide"
ttcagcagccacggagaaagc

SEQ ID NO: 30856 - DNA, 21 bp, Artificial Sequence
  source: /note="Description of Artificial Sequence: Synthetic oligonucleotide"
ttcagcagcaacacagaactc

SEQ ID NO: 30857 - DNA, 21 bp, Artificial Sequence
  source: /note="Description of Artificial Sequence: Synthetic oligonucleotide"
ttcagcagcaacacattcgac

SEQ ID NO: 30858 - DNA, 21 bp, Artificial Sequence
  source: /note="Description of Artificial Sequence: Synthetic oligonucleotide"
ttcagcagcaacacaagcgca

SEQ ID NO: 30859 - DNA, 21 bp, Artificial Sequence
  source: /note="Description of Artificial Sequence: Synthetic oligonucleotide"
ttcagcagcaacacaagcgaa

SEQ ID NO: 30860 - DNA, 21 bp, Artificial Sequence
  source: /note="Description of Artificial Sequence: Synthetic oligonucleotide"
ttcagcagcccaagcggatac

SEQ ID NO: 30861 - DNA, 21 bp, Artificial Sequence
  source: /note="Description of Artificial Sequence: Synthetic oligonucleotide"
ttcagcagcagaacacaagca

SEQ ID NO: 30862 - DNA, 21 bp, Artificial Sequence
  source: /note="Description of Artificial Sequence: Synthetic oligonucleotide"
ttcagcagcagcatggcagca

SEQ ID NO: 30863 - DNA, 21 bp, Artificial Sequence
  source: /note="Description of Artificial Sequence: Synthetic oligonucleotide"
ttcagcagcagcacactcaaa

SEQ ID NO: 30864 - DNA, 21 bp, Artificial Sequence
  source: /note="Description of Artificial Sequence: Synthetic oligonucleotide"
ttcagcagcagcgtcacaagc

SEQ ID NO: 30865 - DNA, 21 bp, Artificial Sequence
  source: /note="Description of Artificial Sequence: Synthetic oligonucleotide"
ttcagcagcacaaacctcgca

SEQ ID NO: 30866 - DNA, 21 bp, Artificial Sequence
  source: /note="Description of Artificial Sequence: Synthetic oligonucleotide"
ttcagcagcacaccaggacac

SEQ ID NO: 30867 - DNA, 21 bp, Artificial Sequence
  source: /note="Description of Artificial Sequence: Synthetic oligonucleotide"
ttcagcagcacaagcccagac

SEQ ID NO: 30868 - DNA, 21 bp, Artificial Sequence
  source: /note="Description of Artificial Sequence: Synthetic oligonucleotide"
ttcagcagcacaagcccaatg

SEQ ID NO: 30869 - DNA, 21 bp, Artificial Sequence
  source: /note="Description of Artificial Sequence: Synthetic oligonucleotide"
ttcagcagcacaagcagcgca

SEQ ID NO: 30870 - DNA, 21 bp, Artificial Sequence
  source: /note="Description of Artificial Sequence: Synthetic oligonucleotide"
ttcagcagcgtcatcccaagc

SEQ ID NO: 30871 - DNA, 21 bp, Artificial Sequence
  source: /note="Description of Artificial Sequence: Synthetic oligonucleotide"
ttcagcagcgtcagaaacgaa

SEQ ID NO: 30872 - DNA, 21 bp, Artificial Sequence
  source: /note="Description of Artificial Sequence: Synthetic oligonucleotide"
ttcagcagcgtcagcacaaca

SEQ ID NO: 30873 - DNA, 21 bp, Artificial Sequence
  source: /note="Description of Artificial Sequence: Synthetic oligonucleotide"
ttcagcagctacgcaagcatg

SEQ ID NO: 30874 - DNA, 21 bp, Artificial Sequence
  source: /note="Description of Artificial Sequence: Synthetic oligonucleotide"
ttcagcagctacaacaacgca

SEQ ID NO: 30875 - DNA, 21 bp, Artificial Sequence
  source: /note="Description of Artificial Sequence: Synthetic oligonucleotide"
ttcagcacactcagcatccca

SEQ ID NO: 30876 - DNA, 21 bp, Artificial Sequence
  source: /note="Description of Artificial Sequence: Synthetic oligonucleotide"
ttcagcacaatgccagcaaaa

SEQ ID NO: 30877 - DNA, 21 bp, Artificial Sequence
  source: /note="Description of Artificial Sequence: Synthetic oligonucleotide"
ttcagcacaatgccaagagac

SEQ ID NO: 30878 - DNA, 21 bp, Artificial Sequence
  source: /note="Description of Artificial Sequence: Synthetic oligonucleotide"
ttcagcacaagaacacaacca

SEQ ID NO: 30879 - DNA, 21 bp, Artificial Sequence
  source: /note="Description of Artificial Sequence: Synthetic oligonucleotide"
ttcagcacaagcggacaagaa

SEQ ID NO: 30880 - DNA, 21 bp, Artificial Sequence
  source: /note="Description of Artificial Sequence: Synthetic oligonucleotide"
ttcagcacagtccaccaagca

SEQ ID NO: 30881 - DNA, 21 bp, Artificial Sequence
  source: /note="Description of Artificial Sequence: Synthetic oligonucleotide"
ttcagcacagtcaaagcagac

SEQ ID NO: 30882 - DNA, 21 bp, Artificial Sequence
  source: /note="Description of Artificial Sequence: Synthetic oligonucleotide"
ttcagcacatacagccaccac

SEQ ID NO: 30883 - DNA, 21 bp, Artificial Sequence
  source: /note="Description of Artificial Sequence: Synthetic oligonucleotide"
ttcagcgtcgcaagaatcgga

SEQ ID NO: 30884 - DNA, 21 bp, Artificial Sequence
  source: /note="Description of Artificial Sequence: Synthetic oligonucleotide"
ttcagcgtcccaagcgcagga

SEQ ID NO: 30885 - DNA, 21 bp, Artificial Sequence
  source: /note="Description of Artificial Sequence: Synthetic oligonucleotide"
ttcacagcaaaaggaatcaca

SEQ ID NO: 30886 - DNA, 21 bp, Artificial Sequence
  source: /note="Description of Artificial Sequence: Synthetic oligonucleotide"
ttcacagcaagaacaacagca

SEQ ID NO: 30887 - DNA, 21 bp, Artificial Sequence
  source: /note="Description of Artificial Sequence: Synthetic oligonucleotide"
ttcacagcaagcggagtcagc

SEQ ID NO: 30888 - DNA, 21 bp, Artificial Sequence
  source: /note="Description of Artificial Sequence: Synthetic oligonucleotide"
ttcacagcaacagtcgcaatc

SEQ ID NO: 30889 - DNA, 21 bp, Artificial Sequence
  source: /note="Description of Artificial Sequence: Synthetic oligonucleotide"
ttcacatgcccagcagtcagc

SEQ ID NO: 30890 - DNA, 21 bp, Artificial Sequence
  source: /note="Description of Artificial Sequence: Synthetic oligonucleotide"
ttcacagacatcgacgacaga

SEQ ID NO: 30891 - DNA, 21 bp, Artificial Sequence
  source: /note="Description of Artificial Sequence: Synthetic oligonucleotide"
ttcacagacagacaaggatac

SEQ ID NO: 30892 - DNA, 21 bp, Artificial Sequence
  source: /note="Description of Artificial Sequence: Synthetic oligonucleotide"
ttcacagacagcagcccatac

SEQ ID NO: 30893 - DNA, 21 bp, Artificial Sequence
  source: /note="Description of Artificial Sequence: Synthetic oligonucleotide"
ttcacagaacacggatacagc

SEQ ID NO: 30894 - DNA, 21 bp, Artificial Sequence
  source: /note="Description of Artificial Sequence: Synthetic oligonucleotide"
ttcacagaaccaagcacaagc

SEQ ID NO: 30895 - DNA, 21 bp, Artificial Sequence
  source: /note="Description of Artificial Sequence: Synthetic oligonucleotide"
ttcacaggaaaaggagacgtc

SEQ ID NO: 30896 - DNA, 21 bp, Artificial Sequence
  source: /note="Description of Artificial Sequence: Synthetic oligonucleotide"
ttcacaggaacacacagcgca

SEQ ID NO: 30897 - DNA, 21 bp, Artificial Sequence
  source: /note="Description of Artificial Sequence: Synthetic oligonucleotide"
ttcacacacagagtcccagac

SEQ ID NO: 30898 - DNA, 21 bp, Artificial Sequence
  source: /note="Description of Artificial Sequence: Synthetic oligonucleotide"
ttcacaatcaaaacaatcctc

SEQ ID NO: 30899 - DNA, 21 bp, Artificial Sequence
  source: /note="Description of Artificial Sequence: Synthetic oligonucleotide"
ttcacaaaaatgcaactcagc

SEQ ID NO: 30900 - DNA, 21 bp, Artificial Sequence
  source: /note="Description of Artificial Sequence: Synthetic oligonucleotide"
ttcacaaaaccaagcacaaca

SEQ ID NO: 30901 - DNA, 21 bp, Artificial Sequence
  source: /note="Description of Artificial Sequence: Synthetic oligonucleotide"
ttcacaaaaagcaaagcagac

SEQ ID NO: 30902 - DNA, 21 bp, Artificial Sequence
  source: /note="Description of Artificial Sequence: Synthetic oligonucleotide"
ttcacactcgaaagcaaactc

SEQ ID NO: 30903 - DNA, 21 bp, Artificial Sequence
  source: /note="Description of Artificial Sequence: Synthetic oligonucleotide"
ttcacactcgtcacactcgaa

SEQ ID NO: 30904 - DNA, 21 bp, Artificial Sequence
  source: /note="Description of Artificial Sequence: Synthetic oligonucleotide"
ttcacaatggcaccaatcgtc

SEQ ID NO: 30905 - DNA, 21 bp, Artificial Sequence
  source: /note="Description of Artificial Sequence: Synthetic oligonucleotide"
ttcacaaacgacccaagcagc

SEQ ID NO: 30906 - DNA, 21 bp, Artificial Sequence
  source: /note="Description of Artificial Sequence: Synthetic oligonucleotide"
ttcacaaacagagacgtcgca

SEQ ID NO: 30907 - DNA, 21 bp, Artificial Sequence
  source: /note="Description of Artificial Sequence: Synthetic oligonucleotide"
ttcacaaacagcagcagccca

SEQ ID NO: 30908 - DNA, 21 bp, Artificial Sequence
  source: /note="Description of Artificial Sequence: Synthetic oligonucleotide"
ttcacaccactcatcagccac

SEQ ID NO: 30909 - DNA, 21 bp, Artificial Sequence
  source: /note="Description of Artificial Sequence: Synthetic oligonucleotide"
ttcacacaagcactcttccca

SEQ ID NO: 30910 - DNA, 21 bp, Artificial Sequence
  source: /note="Description of Artificial Sequence: Synthetic oligonucleotide"
ttcacacaactcccaagcctc

SEQ ID NO: 30911 - DNA, 21 bp, Artificial Sequence
  source: /note="Description of Artificial Sequence: Synthetic oligonucleotide"
ttcacacaaatgagcctcagc

SEQ ID NO: 30912 - DNA, 21 bp, Artificial Sequence
  source: /note="Description of Artificial Sequence: Synthetic oligonucleotide"
ttcacacaaaacaaaccaatg

SEQ ID NO: 30913 - DNA, 21 bp, Artificial Sequence
  source: /note="Description of Artificial Sequence: Synthetic oligonucleotide"
ttcacacaaagcctcccaaca

SEQ ID NO: 30914 - DNA, 21 bp, Artificial Sequence
  source: /note="Description of Artificial Sequence: Synthetic oligonucleotide"
ttcacaagactcgaaccacaa

SEQ ID NO: 30915 - DNA, 21 bp, Artificial Sequence
  source: /note="Description of Artificial Sequence: Synthetic oligonucleotide"
ttcacaagaccaagcctcgca

SEQ ID NO: 30916 - DNA, 21 bp, Artificial Sequence
  source: /note="Description of Artificial Sequence: Synthetic oligonucleotide"
ttcacaagaagcgtcgcagca

SEQ ID NO: 30917 - DNA, 21 bp, Artificial Sequence
  source: /note="Description of Artificial Sequence: Synthetic oligonucleotide"
ttcacaagcgcaccactcctc

SEQ ID NO: 30918 - DNA, 21 bp, Artificial Sequence
  source: /note="Description of Artificial Sequence: Synthetic oligonucleotide"
ttcacaagcgcaccaaacatg

SEQ ID NO: 30919 - DNA, 21 bp, Artificial Sequence
  source: /note="Description of Artificial Sequence: Synthetic oligonucleotide"
ttcacaagcgacggaacagaa

SEQ ID NO: 30920 - DNA, 21 bp, Artificial Sequence
  source: /note="Description of Artificial Sequence: Synthetic oligonucleotide"
ttcacaagcaaaggaccattc

SEQ ID NO: 30921 - DNA, 21 bp, Artificial Sequence
  source: /note="Description of Artificial Sequence: Synthetic oligonucleotide"
ttcacaagcaaacacctcgga

SEQ ID NO: 30922 - DNA, 21 bp, Artificial Sequence
  source: /note="Description of Artificial Sequence: Synthetic oligonucleotide"
ttcacaagcagagaagacgca

SEQ ID NO: 30923 - DNA, 21 bp, Artificial Sequence
  source: /note="Description of Artificial Sequence: Synthetic oligonucleotide"
ttcacaagcacattcccaagc

SEQ ID NO: 30924 - DNA, 21 bp, Artificial Sequence
  source: /note="Description of Artificial Sequence: Synthetic oligonucleotide"
ttcacaacagcaccaatcctc

SEQ ID NO: 30925 - DNA, 21 bp, Artificial Sequence
  source: /note="Description of Artificial Sequence: Synthetic oligonucleotide"
ttcacaacagacagagtcagc

SEQ ID NO: 30926 - DNA, 21 bp, Artificial Sequence
  source: /note="Description of Artificial Sequence: Synthetic oligonucleotide"
ttcacaacaaaagcagcattc

SEQ ID NO: 30927 - DNA, 21 bp, Artificial Sequence
  source: /note="Description of Artificial Sequence: Synthetic oligonucleotide"
ttcacagtcaacctcctcgga

SEQ ID NO: 30928 - DNA, 21 bp, Artificial Sequence
  source: /note="Description of Artificial Sequence: Synthetic oligonucleotide"
ttcgtcgcaaacgtcagacca

SEQ ID NO: 30929 - DNA, 21 bp, Artificial Sequence
  source: /note="Description of Artificial Sequence: Synthetic oligonucleotide"
ttcgtcgcaagcgcaagccac

SEQ ID NO: 30930 - DNA, 21 bp, Artificial Sequence
  source: /note="Description of Artificial Sequence: Synthetic oligonucleotide"
ttcgtcgacaacaacctcagc

SEQ ID NO: 30931 - DNA, 21 bp, Artificial Sequence
  source: /note="Description of Artificial Sequence: Synthetic oligonucleotide"
ttcgtcgacccatactacgaa

SEQ ID NO: 30932 - DNA, 21 bp, Artificial Sequence
  source: /note="Description of Artificial Sequence: Synthetic oligonucleotide"
ttcgtcgaaagaagcagcagc

SEQ ID NO: 30933 - DNA, 21 bp, Artificial Sequence
  source: /note="Description of Artificial Sequence: Synthetic oligonucleotide"
ttcgtcggagcaacaatgagc

SEQ ID NO: 30934 - DNA, 21 bp, Artificial Sequence
  source: /note="Description of Artificial Sequence: Synthetic oligonucleotide"
ttcgtcggaaaaccagaaagc

SEQ ID NO: 30935 - DNA, 21 bp, Artificial Sequence
  source: /note="Description of Artificial Sequence: Synthetic oligonucleotide"
ttcgtcggaaacagcagactc

SEQ ID NO: 30936 - DNA, 21 bp, Artificial Sequence
  source: /note="Description of Artificial Sequence: Synthetic oligonucleotide"
ttcgtccacagcggaagacaa

SEQ ID NO: 30937 - DNA, 21 bp, Artificial Sequence
  source: /note="Description of Artificial Sequence: Synthetic oligonucleotide"
ttcgtcatgcacacaagagac

SEQ ID NO: 30938 - DNA, 21 bp, Artificial Sequence
  source: /note="Description of Artificial Sequence: Synthetic oligonucleotide"
ttcgtcaacgcaagagtccca

SEQ ID NO: 30939 - DNA, 21 bp, Artificial Sequence
  source: /note="Description of Artificial Sequence: Synthetic oligonucleotide"
ttcgtcaacccacacccaagc

SEQ ID NO: 30940 - DNA, 21 bp, Artificial Sequence
  source: /note="Description of Artificial Sequence: Synthetic oligonucleotide"
ttcgtcaaccaaacaacagtc

SEQ ID NO: 30941 - DNA, 21 bp, Artificial Sequence
  source: /note="Description of Artificial Sequence: Synthetic oligonucleotide"
ttcgtcccacacgcaaaccaa

SEQ ID NO: 30942 - DNA, 21 bp, Artificial Sequence
  source: /note="Description of Artificial Sequence: Synthetic oligonucleotide"
ttcgtccaacaaagcaaacca

SEQ ID NO: 30943 - DNA, 21 bp, Artificial Sequence
  source: /note="Description of Artificial Sequence: Synthetic oligonucleotide"
ttcgtcagccacagccaaagc

SEQ ID NO: 30944 - DNA, 21 bp, Artificial Sequence
  source: /note="Description of Artificial Sequence: Synthetic oligonucleotide"
ttcgtcagcagagacagagca

SEQ ID NO: 30945 - DNA, 21 bp, Artificial Sequence
  source: /note="Description of Artificial Sequence: Synthetic oligonucleotide"
ttcgtcagcagcatccacgca

SEQ ID NO: 30946 - DNA, 21 bp, Artificial Sequence
  source: /note="Description of Artificial Sequence: Synthetic oligonucleotide"
ttcgtcagcacaccaggaatg

SEQ ID NO: 30947 - DNA, 21 bp, Artificial Sequence
  source: /note="Description of Artificial Sequence: Synthetic oligonucleotide"
ttcgtcagcacaacaagccca

SEQ ID NO: 30948 - DNA, 21 bp, Artificial Sequence
  source: /note="Description of Artificial Sequence: Synthetic oligonucleotide"
ttcgtcagcacagtcgcacca

SEQ ID NO: 30949 - DNA, 21 bp, Artificial Sequence
  source: /note="Description of Artificial Sequence: Synthetic oligonucleotide"
ttcgtcacagcaacactccca

SEQ ID NO: 30950 - DNA, 21 bp, Artificial Sequence
  source: /note="Description of Artificial Sequence: Synthetic oligonucleotide"
ttcgtcacagaaagcatgctc

SEQ ID NO: 30951 - DNA, 21 bp, Artificial Sequence
  source: /note="Description of Artificial Sequence: Synthetic oligonucleotide"
ttcgtcgtcggaagcgacgga

SEQ ID NO: 30952 - DNA, 21 bp, Artificial Sequence
  source: /note="Description of Artificial Sequence: Synthetic oligonucleotide"
ttctggaaagaaggaagccca

SEQ ID NO: 30953 - DNA, 21 bp, Artificial Sequence
  source: /note="Description of Artificial Sequence: Synthetic oligonucleotide"
ttctacccaggaccaaaaatc

SEQ ID NO: 30954 - DNA, 21 bp, Artificial Sequence
  source: /note="Description of Artificial Sequence: Synthetic oligonucleotide"
ttctacccaagcatgaaagac

SEQ ID NO: 30955 - DNA, 21 bp, Artificial Sequence
  source: /note="Description of Artificial Sequence: Synthetic oligonucleotide"
ttctacccaacagaactcaaa

SEQ ID NO: 30956 - DNA, 21 bp, Artificial Sequence
  source: /note="Description of Artificial Sequence: Synthetic oligonucleotide"
ttctacagcgcaacaatgcca

SEQ ID NO: 30957 - DNA, 21 bp, Artificial Sequence
  source: /note="Description of Artificial Sequence: Synthetic oligonucleotide"
ggagcagcagcacaatacaca

SEQ ID NO: 30958 - DNA, 21 bp, Artificial Sequence
  source: /note="Description of Artificial Sequence: Synthetic oligonucleotide"
ggagcagcaccacaaagcatc

SEQ ID NO: 30959 - DNA, 21 bp, Artificial Sequence
  source: /note="Description of Artificial Sequence: Synthetic oligonucleotide"
ggagcagcaagcggactcgga

SEQ ID NO: 30960 - DNA, 21 bp, Artificial Sequence
  source: /note="Description of Artificial Sequence: Synthetic oligonucleotide"
ggagcagcaacactcatcagc

SEQ ID NO: 30961 - DNA, 21 bp, Artificial Sequence
  source: /note="Description of Artificial Sequence: Synthetic oligonucleotide"
ggagcagcaacaagaaaccca

SEQ ID NO: 30962 - DNA, 21 bp, Artificial Sequence
  source: /note="Description of Artificial Sequence: Synthetic oligonucleotide"
ggagcagacgaaccaggagga

SEQ ID NO: 30963 - DNA, 21 bp, Artificial Sequence
  source: /note="Description of Artificial Sequence: Synthetic oligonucleotide"
ggagcagacctcagcggaaga

SEQ ID NO: 30964 - DNA, 21 bp, Artificial Sequence
  source: /note="Description of Artificial Sequence: Synthetic oligonucleotide"
ggagcagacagaaacgtccca

SEQ ID NO: 30965 - DNA, 21 bp, Artificial Sequence
  source: /note="Description of Artificial Sequence: Synthetic oligonucleotide"
ggagcagacagcagcagatac

SEQ ID NO: 30966 - DNA, 21 bp, Artificial Sequence
  source: /note="Description of Artificial Sequence: Synthetic oligonucleotide"
ggagcagaaggaggaggaaac

SEQ ID NO: 30967 - DNA, 21 bp, Artificial Sequence
  source: /note="Description of Artificial Sequence: Synthetic oligonucleotide"
ggagcagaaaaacacctccca

SEQ ID NO: 30968 - DNA, 21 bp, Artificial Sequence
  source: /note="Description of Artificial Sequence: Synthetic oligonucleotide"
ggagcagaaccaatgctcgca

SEQ ID NO: 30969 - DNA, 21 bp, Artificial Sequence
  source: /note="Description of Artificial Sequence: Synthetic oligonucleotide"
ggagcagaaagcctcagcgtc

SEQ ID NO: 30970 - DNA, 21 bp, Artificial Sequence
  source: /note="Description of Artificial Sequence: Synthetic oligonucleotide"
ggagcattcgcactcagcgga

SEQ ID NO: 30971 - DNA, 21 bp, Artificial Sequence
  source: /note="Description of Artificial Sequence: Synthetic oligonucleotide"
ggagcattcggaccaacaagc

SEQ ID NO: 30972 - DNA, 21 bp, Artificial Sequence
  source: /note="Description of Artificial Sequence: Synthetic oligonucleotide"
ggagcaggagcaggaagcaga

SEQ ID NO: 30973 - DNA, 21 bp, Artificial Sequence
  source: /note="Description of Artificial Sequence: Synthetic oligonucleotide"
ggagcaggagaactcccacca

SEQ ID NO: 30974 - DNA, 21 bp, Artificial Sequence
  source: /note="Description of Artificial Sequence: Synthetic oligonucleotide"
ggagcaggactcaaaggaagc

SEQ ID NO: 30975 - DNA, 21 bp, Artificial Sequence
  source: /note="Description of Artificial Sequence: Synthetic oligonucleotide"
ggagcaggactcccagtcaca

SEQ ID NO: 30976 - DNA, 21 bp, Artificial Sequence
  source: /note="Description of Artificial Sequence: Synthetic oligonucleotide"
ggagcaggaatgaacacagca

SEQ ID NO: 30977 - DNA, 21 bp, Artificial Sequence
  source: /note="Description of Artificial Sequence: Synthetic oligonucleotide"
ggagcaggaacagcaatgctc

SEQ ID NO: 30978 - DNA, 21 bp, Artificial Sequence
  source: /note="Description of Artificial Sequence: Synthetic oligonucleotide"
ggagcacacgacacagtcaca

SEQ ID NO: 30979 - DNA, 21 bp, Artificial Sequence
  source: /note="Description of Artificial Sequence: Synthetic oligonucleotide"
ggagcacacgaatgcctcagc

SEQ ID NO: 30980 - DNA, 21 bp, Artificial Sequence
  source: /note="Description of Artificial Sequence: Synthetic oligonucleotide"
ggagcacacggagcataccaa

SEQ ID NO: 30981 - DNA, 21 bp, Artificial Sequence
  source: /note="Description of Artificial Sequence: Synthetic oligonucleotide"
ggagcacacagctacaacgtc

SEQ ID NO: 30982 - DNA, 21 bp, Artificial Sequence
  source: /note="Description of Artificial Sequence: Synthetic oligonucleotide"
ggagcacacacaggactcagc

SEQ ID NO: 30983 - DNA, 21 bp, Artificial Sequence
  source: /note="Description of Artificial Sequence: Synthetic oligonucleotide"
ggagcacacacagtcagactc

SEQ ID NO: 30984 - DNA, 21 bp, Artificial Sequence
  source: /note="Description of Artificial Sequence: Synthetic oligonucleotide"
ggagcacacgtcgcaccagtc

SEQ ID NO: 30985 - DNA, 21 bp, Artificial Sequence
  source: /note="Description of Artificial Sequence: Synthetic oligonucleotide"
ggagcactcgcaacagcaaca

SEQ ID NO: 30986 - DNA, 21 bp, Artificial Sequence
  source: /note="Description of Artificial Sequence: Synthetic oligonucleotide"
ggagcactcgacggaacagca

SEQ ID NO: 30987 - DNA, 21 bp, Artificial Sequence
  source: /note="Description of Artificial Sequence: Synthetic oligonucleotide"
ggagcactcggattcccacaa

SEQ ID NO: 30988 - DNA, 21 bp, Artificial Sequence
  source: /note="Description of Artificial Sequence: Synthetic oligonucleotide"
ggagcactcggagtcgcacac

SEQ ID NO: 30989 - DNA, 21 bp, Artificial Sequence
  source: /note="Description of Artificial Sequence: Synthetic oligonucleotide"
ggagcactcatgcaaaaaaac

SEQ ID NO: 30990 - DNA, 21 bp, Artificial Sequence
  source: /note="Description of Artificial Sequence: Synthetic oligonucleotide"
ggagcactcatggtcagcaga

SEQ ID NO: 30991 - DNA, 21 bp, Artificial Sequence
  source: /note="Description of Artificial Sequence: Synthetic oligonucleotide"
ggagcactcagcgcaaaccaa

SEQ ID NO: 30992 - DNA, 21 bp, Artificial Sequence
  source: /note="Description of Artificial Sequence: Synthetic oligonucleotide"
ggagcactcgtcatcacaagc

SEQ ID NO: 30993 - DNA, 21 bp, Artificial Sequence
  source: /note="Description of Artificial Sequence: Synthetic oligonucleotide"
ggagcaatgagcatcaacgca

SEQ ID NO: 30994 - DNA, 21 bp, Artificial Sequence
  source: /note="Description of Artificial Sequence: Synthetic oligonucleotide"
ggagcaaacggagcactcaga

SEQ ID NO: 30995 - DNA, 21 bp, Artificial Sequence
  source: /note="Description of Artificial Sequence: Synthetic oligonucleotide"
ggagcaaacatcagaatcgca

SEQ ID NO: 30996 - DNA, 21 bp, Artificial Sequence
  source: /note="Description of Artificial Sequence: Synthetic oligonucleotide"
ggagcaaacagactcgacaac

SEQ ID NO: 30997 - DNA, 21 bp, Artificial Sequence
  source: /note="Description of Artificial Sequence: Synthetic oligonucleotide"
ggagcaccaccactcccaaga

SEQ ID NO: 30998 - DNA, 21 bp, Artificial Sequence
  source: /note="Description of Artificial Sequence: Synthetic oligonucleotide"
ggagcacaactcacaagaatg

SEQ ID NO: 30999 - DNA, 21 bp, Artificial Sequence
  source: /note="Description of Artificial Sequence: Synthetic oligonucleotide"
ggagcacaaagacaactcaac

SEQ ID NO: 31000 - DNA, 21 bp, Artificial Sequence
  source: /note="Description of Artificial Sequence: Synthetic oligonucleotide"
ggagcaagagcactcggactc

SEQ ID NO: 31001 - DNA, 21 bp, Artificial Sequence
  source: /note="Description of Artificial Sequence: Synthetic oligonucleotide"
ggagcaagagcaaacggagga

SEQ ID NO: 31002 - DNA, 21 bp, Artificial Sequence
  source: /note="Description of Artificial Sequence: Synthetic oligonucleotide"
ggagcaagagaaatcccaagc

SEQ ID NO: 31003 - DNA, 21 bp, Artificial Sequence
  source: /note="Description of Artificial Sequence: Synthetic oligonucleotide"
ggagcaagaccagacctcgga

SEQ ID NO: 31004 - DNA, 21 bp, Artificial Sequence
  source: /note="Description of Artificial Sequence: Synthetic oligonucleotide"
ggagcaagagtcctcggaagc

SEQ ID NO: 31005 - DNA, 21 bp, Artificial Sequence
  source: /note="Description of Artificial Sequence: Synthetic oligonucleotide"
ggagcaagcgacacagactgg

SEQ ID NO: 31006 - DNA, 21 bp, Artificial Sequence
  source: /note="Description of Artificial Sequence: Synthetic oligonucleotide"
ggagcaagcggaacaagcaca

SEQ ID NO: 31007 - DNA, 21 bp, Artificial Sequence
  source: /note="Description of Artificial Sequence: Synthetic oligonucleotide"
ggagcaagcatcaaaagcagc

SEQ ID NO: 31008 - DNA, 21 bp, Artificial Sequence
  source: /note="Description of Artificial Sequence: Synthetic oligonucleotide"
ggagcaagcaaaaacccaaca

SEQ ID NO: 31009 - DNA, 21 bp, Artificial Sequence
  source: /note="Description of Artificial Sequence: Synthetic oligonucleotide"
ggagcaagcctcgcagacgac

SEQ ID NO: 31010 - DNA, 21 bp, Artificial Sequence
  source: /note="Description of Artificial Sequence: Synthetic oligonucleotide"
ggagcaagcctcaaaccagtc

SEQ ID NO: 31011 - DNA, 21 bp, Artificial Sequence
  source: /note="Description of Artificial Sequence: Synthetic oligonucleotide"
ggagcaagcagcgcaagcgga

SEQ ID NO: 31012 - DNA, 21 bp, Artificial Sequence
  source: /note="Description of Artificial Sequence: Synthetic oligonucleotide"
ggagcaagcagcctcaaacca

SEQ ID NO: 31013 - DNA, 21 bp, Artificial Sequence
  source: /note="Description of Artificial Sequence: Synthetic oligonucleotide"
ggagcaagcagcagaccagtc

SEQ ID NO: 31014 - DNA, 21 bp, Artificial Sequence
  source: /note="Description of Artificial Sequence: Synthetic oligonucleotide"
ggagcaagcacaagaaacatc

SEQ ID NO: 31015 - DNA, 21 bp, Artificial Sequence
  source: /note="Description of Artificial Sequence: Synthetic oligonucleotide"
ggagcaagcgtcaacccaaca

SEQ ID NO: 31016 - DNA, 21 bp, Artificial Sequence
  source: /note="Description of Artificial Sequence: Synthetic oligonucleotide"
ggagcaacaccaaaaacactc

SEQ ID NO: 31017 - DNA, 21 bp, Artificial Sequence
  source: /note="Description of Artificial Sequence: Synthetic oligonucleotide"
ggagcaacaccaccaagcaca

SEQ ID NO: 31018 - DNA, 21 bp, Artificial Sequence
  source: /note="Description of Artificial Sequence: Synthetic oligonucleotide"
ggagcaacacaattcagagaa

SEQ ID NO: 31019 - DNA, 21 bp, Artificial Sequence
  source: /note="Description of Artificial Sequence: Synthetic oligonucleotide"
ggagcaacaagccaaatcatg

SEQ ID NO: 31020 - DNA, 21 bp, Artificial Sequence
  source: /note="Description of Artificial Sequence: Synthetic oligonucleotide"
ggagcagtcagaccactcatg

SEQ ID NO: 31021 - DNA, 21 bp, Artificial Sequence
  source: /note="Description of Artificial Sequence: Synthetic oligonucleotide"
ggagcatggaaagcagaaaca

SEQ ID NO: 31022 - DNA, 21 bp, Artificial Sequence
  source: /note="Description of Artificial Sequence: Synthetic oligonucleotide"
ggagcatggctcccaaacgca

SEQ ID NO: 31023 - DNA, 21 bp, Artificial Sequence
  source: /note="Description of Artificial Sequence: Synthetic oligonucleotide"
ggagcatggagcctcccagac

SEQ ID NO: 31024 - DNA, 21 bp, Artificial Sequence
  source: /note="Description of Artificial Sequence: Synthetic oligonucleotide"
ggagcatacgcaagagcaaca

SEQ ID NO: 31025 - DNA, 21 bp, Artificial Sequence
  source: /note="Description of Artificial Sequence: Synthetic oligonucleotide"
ggagcatacgcatacaacgga

SEQ ID NO: 31026 - DNA, 21 bp, Artificial Sequence
  source: /note="Description of Artificial Sequence: Synthetic oligonucleotide"
ggagcatacggaatgagcgaa

SEQ ID NO: 31027 - DNA, 21 bp, Artificial Sequence
  source: /note="Description of Artificial Sequence: Synthetic oligonucleotide"
ggagcatacagaccagacctc

SEQ ID NO: 31028 - DNA, 21 bp, Artificial Sequence
  source: /note="Description of Artificial Sequence: Synthetic oligonucleotide"
ggatgcagcggacaacaaagc

SEQ ID NO: 31029 - DNA, 21 bp, Artificial Sequence
  source: /note="Description of Artificial Sequence: Synthetic oligonucleotide"
ggatgcagcagcctcccagaa

SEQ ID NO: 31030 - DNA, 21 bp, Artificial Sequence
  source: /note="Description of Artificial Sequence: Synthetic oligonucleotide"
ggatgcacaggataccaagca

SEQ ID NO: 31031 - DNA, 21 bp, Artificial Sequence
  source: /note="Description of Artificial Sequence: Synthetic oligonucleotide"
ggatgcgtcggaccattcagc

SEQ ID NO: 31032 - DNA, 21 bp, Artificial Sequence
  source: /note="Description of Artificial Sequence: Synthetic oligonucleotide"
ggagacgcagcatacaaaaac

SEQ ID NO: 31033 - DNA, 21 bp, Artificial Sequence
  source: /note="Description of Artificial Sequence: Synthetic oligonucleotide"
ggagacgcattcgtcgtcgga

SEQ ID NO: 31034 - DNA, 21 bp, Artificial Sequence
  source: /note="Description of Artificial Sequence: Synthetic oligonucleotide"
ggagacgcaacagacagaatg

SEQ ID NO: 31035 - DNA, 21 bp, Artificial Sequence
  source: /note="Description of Artificial Sequence: Synthetic oligonucleotide"
ggagacttcggaatgaaactc

SEQ ID NO: 31036 - DNA, 21 bp, Artificial Sequence
  source: /note="Description of Artificial Sequence: Synthetic oligonucleotide"
ggagacggaacaagaggagca

SEQ ID NO: 31037 - DNA, 21 bp, Artificial Sequence
  source: /note="Description of Artificial Sequence: Synthetic oligonucleotide"
ggagacggagtctacccagca

SEQ ID NO: 31038 - DNA, 21 bp, Artificial Sequence
  source: /note="Description of Artificial Sequence: Synthetic oligonucleotide"
ggagaccacaaaagcggagca

SEQ ID NO: 31039 - DNA, 21 bp, Artificial Sequence
  source: /note="Description of Artificial Sequence: Synthetic oligonucleotide"
ggagacaaagtcagaacactc

SEQ ID NO: 31040 - DNA, 21 bp, Artificial Sequence
  source: /note="Description of Artificial Sequence: Synthetic oligonucleotide"
ggagacctccacatcccagtc

SEQ ID NO: 31041 - DNA, 21 bp, Artificial Sequence
  source: /note="Description of Artificial Sequence: Synthetic oligonucleotide"
ggagacctcaacccagtccca

SEQ ID NO: 31042 - DNA, 21 bp, Artificial Sequence
  source: /note="Description of Artificial Sequence: Synthetic oligonucleotide"
ggagacctctactacaaagca

SEQ ID NO: 31043 - DNA, 21 bp, Artificial Sequence
  source: /note="Description of Artificial Sequence: Synthetic oligonucleotide"
ggagacatgctcaacgtcatc

SEQ ID NO: 31044 - DNA, 21 bp, Artificial Sequence
  source: /note="Description of Artificial Sequence: Synthetic oligonucleotide"
ggagacccaaacccagcagaa

SEQ ID NO: 31045 - DNA, 21 bp, Artificial Sequence
  source: /note="Description of Artificial Sequence: Synthetic oligonucleotide"
ggagacccagtccaccaaagc

SEQ ID NO: 31046 - DNA, 21 bp, Artificial Sequence
  source: /note="Description of Artificial Sequence: Synthetic oligonucleotide"
ggagacagagacggaagctgg

SEQ ID NO: 31047 - DNA, 21 bp, Artificial Sequence
  source: /note="Description of Artificial Sequence: Synthetic oligonucleotide"
ggagacagaatgccaagaagc

SEQ ID NO: 31048 - DNA, 21 bp, Artificial Sequence
  source: /note="Description of Artificial Sequence: Synthetic oligonucleotide"
ggagacagaagcacaagccac

SEQ ID NO: 31049 - DNA, 21 bp, Artificial Sequence
  source: /note="Description of Artificial Sequence: Synthetic oligonucleotide"
ggagacagaacaagcctcaga

SEQ ID NO: 31050 - DNA, 21 bp, Artificial Sequence
  source: /note="Description of Artificial Sequence: Synthetic oligonucleotide"
ggagacagagtcgtcggagtc

SEQ ID NO: 31051 - DNA, 21 bp, Artificial Sequence
  source: /note="Description of Artificial Sequence: Synthetic oligonucleotide"
ggagacagcttcccaatgagc

SEQ ID NO: 31052 - DNA, 21 bp, Artificial Sequence
  source: /note="Description of Artificial Sequence: Synthetic oligonucleotide"
ggagacagccaactctactac

SEQ ID NO: 31053 - DNA, 21 bp, Artificial Sequence
  source: /note="Description of Artificial Sequence: Synthetic oligonucleotide"
ggagacagcagcctccacagc

SEQ ID NO: 31054 - DNA, 21 bp, Artificial Sequence
  source: /note="Description of Artificial Sequence: Synthetic oligonucleotide"
ggagacacacacctcatcgga

SEQ ID NO: 31055 - DNA, 21 bp, Artificial Sequence
  source: /note="Description of Artificial Sequence: Synthetic oligonucleotide"
ggagacacactcaaagcacca

SEQ ID NO: 31056 - DNA, 21 bp, Artificial Sequence
  source: /note="Description of Artificial Sequence: Synthetic oligonucleotide"
ggagacacaagaccaagcctc

SEQ ID NO: 31057 - DNA, 21 bp, Artificial Sequence
  source: /note="Description of Artificial Sequence: Synthetic oligonucleotide"
ggagacgtcatcacaacacac

SEQ ID NO: 31058 - DNA, 21 bp, Artificial Sequence
  source: /note="Description of Artificial Sequence: Synthetic oligonucleotide"
ggagacgtcagcgtctacgac

SEQ ID NO: 31059 - DNA, 21 bp, Artificial Sequence
  source: /note="Description of Artificial Sequence: Synthetic oligonucleotide"
ggagaagacgcattcctcaga

SEQ ID NO: 31060 - DNA, 21 bp, Artificial Sequence
  source: /note="Description of Artificial Sequence: Synthetic oligonucleotide"
ggagaagacggattcagctac

SEQ ID NO: 31061 - DNA, 21 bp, Artificial Sequence
  source: /note="Description of Artificial Sequence: Synthetic oligonucleotide"
ggagaagaccacagcccacac

SEQ ID NO: 31062 - DNA, 21 bp, Artificial Sequence
  source: /note="Description of Artificial Sequence: Synthetic oligonucleotide"
ggagaaggaagctacccaaga

SEQ ID NO: 31063 - DNA, 21 bp, Artificial Sequence
  source: /note="Description of Artificial Sequence: Synthetic oligonucleotide"
ggagaaggaacataccaagca

SEQ ID NO: 31064 - DNA, 21 bp, Artificial Sequence
  source: /note="Description of Artificial Sequence: Synthetic oligonucleotide"
ggagaacacaaagcaaacagc

SEQ ID NO: 31065 - DNA, 21 bp, Artificial Sequence
  source: /note="Description of Artificial Sequence: Synthetic oligonucleotide"
ggagaaaaactcagagcatac

SEQ ID NO: 31066 - DNA, 21 bp, Artificial Sequence
  source: /note="Description of Artificial Sequence: Synthetic oligonucleotide"
ggagaaaaaagcatcccacca

SEQ ID NO: 31067 - DNA, 21 bp, Artificial Sequence
  source: /note="Description of Artificial Sequence: Synthetic oligonucleotide"
ggagaaaaaagcctcgtcgtc

SEQ ID NO: 31068 - DNA, 21 bp, Artificial Sequence
  source: /note="Description of Artificial Sequence: Synthetic oligonucleotide"
ggagaactcttcctcagcagc

SEQ ID NO: 31069 - DNA, 21 bp, Artificial Sequence
  source: /note="Description of Artificial Sequence: Synthetic oligonucleotide"
ggagaaaacccactcccagtc

SEQ ID NO: 31070 - DNA, 21 bp, Artificial Sequence
  source: /note="Description of Artificial Sequence: Synthetic oligonucleotide"
ggagaaccattcatgagagca

SEQ ID NO: 31071 - DNA, 21 bp, Artificial Sequence
  source: /note="Description of Artificial Sequence: Synthetic oligonucleotide"
ggagaaccaaaacaccacagc

SEQ ID NO: 31072 - DNA, 21 bp, Artificial Sequence
  source: /note="Description of Artificial Sequence: Synthetic oligonucleotide"
ggagaaccagtcgacacatgg

SEQ ID NO: 31073 - DNA, 21 bp, Artificial Sequence
  source: /note="Description of Artificial Sequence: Synthetic oligonucleotide"
ggagaaccagtcctcggagca

SEQ ID NO: 31074 - DNA, 21 bp, Artificial Sequence
  source: /note="Description of Artificial Sequence: Synthetic oligonucleotide"
ggagaaagattcagagaatgg

SEQ ID NO: 31075 - DNA, 21 bp, Artificial Sequence
  source: /note="Description of Artificial Sequence: Synthetic oligonucleotide"
ggagaaagaatgaaaatcgac

SEQ ID NO: 31076 - DNA, 21 bp, Artificial Sequence
  source: /note="Description of Artificial Sequence: Synthetic oligonucleotide"
ggagaaagaagcctcaacatg

SEQ ID NO: 31077 - DNA, 21 bp, Artificial Sequence
  source: /note="Description of Artificial Sequence: Synthetic oligonucleotide"
ggagaaagaagcccaccagaa

SEQ ID NO: 31078 - DNA, 21 bp, Artificial Sequence
  source: /note="Description of Artificial Sequence: Synthetic oligonucleotide"
ggagaaagcccagcaaacctc

SEQ ID NO: 31079 - DNA, 21 bp, Artificial Sequence
  source: /note="Description of Artificial Sequence: Synthetic oligonucleotide"
ggagaaacaccagcacacgca

SEQ ID NO: 31080 - DNA, 21 bp, Artificial Sequence
  source: /note="Description of Artificial Sequence: Synthetic oligonucleotide"
ggagaaacaagacacgtcgga

SEQ ID NO: 31081 - DNA, 21 bp, Artificial Sequence
  source: /note="Description of Artificial Sequence: Synthetic oligonucleotide"
ggagaaacaagcgcaatgcaa

SEQ ID NO: 31082 - DNA, 21 bp, Artificial Sequence
  source: /note="Description of Artificial Sequence: Synthetic oligonucleotide"
ggagaaacaacaaaaatgaga

SEQ ID NO: 31083 - DNA, 21 bp, Artificial Sequence
  source: /note="Description of Artificial Sequence: Synthetic oligonucleotide"
ggagaagtcgcaatgctctac

SEQ ID NO: 31084 - DNA, 21 bp, Artificial Sequence
  source: /note="Description of Artificial Sequence: Synthetic oligonucleotide"
ggagaagtcacaatcatgagc

SEQ ID NO: 31085 - DNA, 21 bp, Artificial Sequence
  source: /note="Description of Artificial Sequence: Synthetic oligonucleotide"
ggagaagtcgtcaacacaatg

SEQ ID NO: 31086 - DNA, 21 bp, Artificial Sequence
  source: /note="Description of Artificial Sequence: Synthetic oligonucleotide"
ggattcgacgcaggaaaaagc

SEQ ID NO: 31087 - DNA, 21 bp, Artificial Sequence
  source: /note="Description of Artificial Sequence: Synthetic oligonucleotide"
ggattcgacatcgcaagcgga

SEQ ID NO: 31088 - DNA, 21 bp, Artificial Sequence
  source: /note="Description of Artificial Sequence: Synthetic oligonucleotide"
ggattcgacgtcaaaatgagc

SEQ ID NO: 31089 - DNA, 21 bp, Artificial Sequence
  source: /note="Description of Artificial Sequence: Synthetic oligonucleotide"
ggattcgaagtccaactcatc

SEQ ID NO: 31090 - DNA, 21 bp, Artificial Sequence
  source: /note="Description of Artificial Sequence: Synthetic oligonucleotide"
ggattcttcgcacaagtccca

SEQ ID NO: 31091 - DNA, 21 bp, Artificial Sequence
  source: /note="Description of Artificial Sequence: Synthetic oligonucleotide"
ggattccacaacgcagcacca

SEQ ID NO: 31092 - DNA, 21 bp, Artificial Sequence
  source: /note="Description of Artificial Sequence: Synthetic oligonucleotide"
ggattcatcagcccaagcgca

SEQ ID NO: 31093 - DNA, 21 bp, Artificial Sequence
  source: /note="Description of Artificial Sequence: Synthetic oligonucleotide"
ggattcaaaaacgcactccca

SEQ ID NO: 31094 - DNA, 21 bp, Artificial Sequence
  source: /note="Description of Artificial Sequence: Synthetic oligonucleotide"
ggattcaacgcactcacagga

SEQ ID NO: 31095 - DNA, 21 bp, Artificial Sequence
  source: /note="Description of Artificial Sequence: Synthetic oligonucleotide"
ggattcaacccaagcctcgtc

SEQ ID NO: 31096 - DNA, 21 bp, Artificial Sequence
  source: /note="Description of Artificial Sequence: Synthetic oligonucleotide"
ggattcaacgtcgcaagcgga

SEQ ID NO: 31097 - DNA, 21 bp, Artificial Sequence
  source: /note="Description of Artificial Sequence: Synthetic oligonucleotide"
ggattcaacgtcggaggacca

SEQ ID NO: 31098 - DNA, 21 bp, Artificial Sequence
  source: /note="Description of Artificial Sequence: Synthetic oligonucleotide"
ggattcccaggaccacaattc

SEQ ID NO: 31099 - DNA, 21 bp, Artificial Sequence
  source: /note="Description of Artificial Sequence: Synthetic oligonucleotide"
ggattcagcggaacaccatac

SEQ ID NO: 31100 - DNA, 21 bp, Artificial Sequence
  source: /note="Description of Artificial Sequence: Synthetic oligonucleotide"
ggattcagccacatcagcctc

SEQ ID NO: 31101 - DNA, 21 bp, Artificial Sequence
  source: /note="Description of Artificial Sequence: Synthetic oligonucleotide"
ggattcagcatcagaagcaca

SEQ ID NO: 31102 - DNA, 21 bp, Artificial Sequence
  source: /note="Description of Artificial Sequence: Synthetic oligonucleotide"
ggattcagcagcctcagcagc

SEQ ID NO: 31103 - DNA, 21 bp, Artificial Sequence
  source: /note="Description of Artificial Sequence: Synthetic oligonucleotide"
ggattcacacaaagccaaatg

SEQ ID NO: 31104 - DNA, 21 bp, Artificial Sequence
  source: /note="Description of Artificial Sequence: Synthetic oligonucleotide"
ggaggagcagcaagagaactc

SEQ ID NO: 31105 - DNA, 21 bp, Artificial Sequence
  source: /note="Description of Artificial Sequence: Synthetic oligonucleotide"
ggaggagcagcaacaagcgtc

SEQ ID NO: 31106 - DNA, 21 bp, Artificial Sequence
  source: /note="Description of Artificial Sequence: Synthetic oligonucleotide"
ggaggagcaggagcaagaaca

SEQ ID NO: 31107 - DNA, 21 bp, Artificial Sequence
  source: /note="Description of Artificial Sequence: Synthetic oligonucleotide"
ggaggagcaagaagcagcatg

SEQ ID NO: 31108 - DNA, 21 bp, Artificial Sequence
  source: /note="Description of Artificial Sequence: Synthetic oligonucleotide"
ggaggagcagtccacacagtc

SEQ ID NO: 31109 - DNA, 21 bp, Artificial Sequence
  source: /note="Description of Artificial Sequence: Synthetic oligonucleotide"
ggaggagacagcggagcagaa

SEQ ID NO: 31110 - DNA, 21 bp, Artificial Sequence
  source: /note="Description of Artificial Sequence: Synthetic oligonucleotide"
ggaggagaaaacgtctacatc

SEQ ID NO: 31111 - DNA, 21 bp, Artificial Sequence
  source: /note="Description of Artificial Sequence: Synthetic oligonucleotide"
ggaggattcgcacaccaaagc

SEQ ID NO: 31112 - DNA, 21 bp, Artificial Sequence
  source: /note="Description of Artificial Sequence: Synthetic oligonucleotide"
ggaggattcaacggagcaaac

SEQ ID NO: 31113 - DNA, 21 bp, Artificial Sequence
  source: /note="Description of Artificial Sequence: Synthetic oligonucleotide"
ggaggaggactcacaatgaca

SEQ ID NO: 31114 - DNA, 21 bp, Artificial Sequence
  source: /note="Description of Artificial Sequence: Synthetic oligonucleotide"
ggaggaggaccagcactccca

SEQ ID NO: 31115 - DNA, 21 bp, Artificial Sequence
  source: /note="Description of Artificial Sequence: Synthetic oligonucleotide"
ggaggaggagtcaacaaacca

SEQ ID NO: 31116 - DNA, 21 bp, Artificial Sequence
  source: /note="Description of Artificial Sequence: Synthetic oligonucleotide"
ggaggacacatgagagacgga

SEQ ID NO: 31117 - DNA, 21 bp, Artificial Sequence
  source: /note="Description of Artificial Sequence: Synthetic oligonucleotide"
ggaggaatcgaaagcgcagtc

SEQ ID NO: 31118 - DNA, 21 bp, Artificial Sequence
  source: /note="Description of Artificial Sequence: Synthetic oligonucleotide"
ggaggaatccaaagcacagga

SEQ ID NO: 31119 - DNA, 21 bp, Artificial Sequence
  source: /note="Description of Artificial Sequence: Synthetic oligonucleotide"
ggaggaaaagacagaccagaa

SEQ ID NO: 31120 - DNA, 21 bp, Artificial Sequence
  source: /note="Description of Artificial Sequence: Synthetic oligonucleotide"
ggaggaaaacaaccacaagca

SEQ ID NO: 31121 - DNA, 21 bp, Artificial Sequence
  source: /note="Description of Artificial Sequence: Synthetic oligonucleotide"
ggaggaaaagtcgcaacagga

SEQ ID NO: 31122 - DNA, 21 bp, Artificial Sequence
  source: /note="Description of Artificial Sequence: Synthetic oligonucleotide"
ggaggactcaacagaaaccca

SEQ ID NO: 31123 - DNA, 21 bp, Artificial Sequence
  source: /note="Description of Artificial Sequence: Synthetic oligonucleotide"
ggaggactcccaagcccagca

SEQ ID NO: 31124 - DNA, 21 bp, Artificial Sequence
  source: /note="Description of Artificial Sequence: Synthetic oligonucleotide"
ggaggactcagcaaaagcctc

SEQ ID NO: 31125 - DNA, 21 bp, Artificial Sequence
  source: /note="Description of Artificial Sequence: Synthetic oligonucleotide"
ggaggaatggcaccaggacca

SEQ ID NO: 31126 - DNA, 21 bp, Artificial Sequence
  source: /note="Description of Artificial Sequence: Synthetic oligonucleotide"
ggaggaccagcatacgtcgga

SEQ ID NO: 31127 - DNA, 21 bp, Artificial Sequence
  source: /note="Description of Artificial Sequence: Synthetic oligonucleotide"
ggaggaccaggaaacaaccca

SEQ ID NO: 31128 - DNA, 21 bp, Artificial Sequence
  source: /note="Description of Artificial Sequence: Synthetic oligonucleotide"
ggaggaccactcccaaaaagc

SEQ ID NO: 31129 - DNA, 21 bp, Artificial Sequence
  source: /note="Description of Artificial Sequence: Synthetic oligonucleotide"
ggaggaccactcacaggacca

SEQ ID NO: 31130 - DNA, 21 bp, Artificial Sequence
  source: /note="Description of Artificial Sequence: Synthetic oligonucleotide"
ggaggaccaagagtcgcacca

SEQ ID NO: 31131 - DNA, 21 bp, Artificial Sequence
  source: /note="Description of Artificial Sequence: Synthetic oligonucleotide"
ggaggaccatacggaccagca

SEQ ID NO: 31132 - DNA, 21 bp, Artificial Sequence
  source: /note="Description of Artificial Sequence: Synthetic oligonucleotide"
ggaggacaagcaggaaaaaca

SEQ ID NO: 31133 - DNA, 21 bp, Artificial Sequence
  source: /note="Description of Artificial Sequence: Synthetic oligonucleotide"
ggaggacaacacctcgcacca

SEQ ID NO: 31134 - DNA, 21 bp, Artificial Sequence
  source: /note="Description of Artificial Sequence: Synthetic oligonucleotide"
ggaggacaaagctgcagagaa

SEQ ID NO: 31135 - DNA, 21 bp, Artificial Sequence
  source: /note="Description of Artificial Sequence: Synthetic oligonucleotide"
ggaggaagactcgcagtcgaa

SEQ ID NO: 31136 - DNA, 21 bp, Artificial Sequence
  source: /note="Description of Artificial Sequence: Synthetic oligonucleotide"
ggaggaagactccaacaagga

SEQ ID NO: 31137 - DNA, 21 bp, Artificial Sequence
  source: /note="Description of Artificial Sequence: Synthetic oligonucleotide"
ggaggaagaccagacccagaa

SEQ ID NO: 31138 - DNA, 21 bp, Artificial Sequence
  source: /note="Description of Artificial Sequence: Synthetic oligonucleotide"
ggaggaagaccaacaatcaca

SEQ ID NO: 31139 - DNA, 21 bp, Artificial Sequence
  source: /note="Description of Artificial Sequence: Synthetic oligonucleotide"
ggaggaagagtcgtctacagc

SEQ ID NO: 31140 - DNA, 21 bp, Artificial Sequence
  source: /note="Description of Artificial Sequence: Synthetic oligonucleotide"
ggaggaagatacagcgaactc

SEQ ID NO: 31141 - DNA, 21 bp, Artificial Sequence
  source: /note="Description of Artificial Sequence: Synthetic oligonucleotide"
ggaggaagcggactcgcagga

SEQ ID NO: 31142 - DNA, 21 bp, Artificial Sequence
  source: /note="Description of Artificial Sequence: Synthetic oligonucleotide"
ggaggaagcatggacagcctc

SEQ ID NO: 31143 - DNA, 21 bp, Artificial Sequence
  source: /note="Description of Artificial Sequence: Synthetic oligonucleotide"
ggaggaagcgtcagaacactc

SEQ ID NO: 31144 - DNA, 21 bp, Artificial Sequence
  source: /note="Description of Artificial Sequence: Synthetic oligonucleotide"
ggaggaacaagcagaagccca

SEQ ID NO: 31145 - DNA, 21 bp, Artificial Sequence
  source: /note="Description of Artificial Sequence: Synthetic oligonucleotide"
ggaggaacaacaaacctcttc

SEQ ID NO: 31146 - DNA, 21 bp, Artificial Sequence
  source: /note="Description of Artificial Sequence: Synthetic oligonucleotide"
ggaggagtcgcatacatcgca

SEQ ID NO: 31147 - DNA, 21 bp, Artificial Sequence
  source: /note="Description of Artificial Sequence: Synthetic oligonucleotide"
ggaggagtcggaaaaccagca

SEQ ID NO: 31148 - DNA, 21 bp, Artificial Sequence
  source: /note="Description of Artificial Sequence: Synthetic oligonucleotide"
ggaggagtcaacgcaatgaga

SEQ ID NO: 31149 - DNA, 21 bp, Artificial Sequence
  source: /note="Description of Artificial Sequence: Synthetic oligonucleotide"
ggaggatggagcagcgcacca

SEQ ID NO: 31150 - DNA, 21 bp, Artificial Sequence
  source: /note="Description of Artificial Sequence: Synthetic oligonucleotide"
ggaggatacgaaagcaacaac

SEQ ID NO: 31151 - DNA, 21 bp, Artificial Sequence
  source: /note="Description of Artificial Sequence: Synthetic oligonucleotide"
ggaggatacagcatgggacac

SEQ ID NO: 31152 - DNA, 21 bp, Artificial Sequence
  source: /note="Description of Artificial Sequence: Synthetic oligonucleotide"
ggacacgcaatccaactcctc

SEQ ID NO: 31153 - DNA, 21 bp, Artificial Sequence
  source: /note="Description of Artificial Sequence: Synthetic oligonucleotide"
ggacacgcaaaacacaacgtc

SEQ ID NO: 31154 - DNA, 21 bp, Artificial Sequence
  source: /note="Description of Artificial Sequence: Synthetic oligonucleotide"
ggacacgcaccacacatgatc

SEQ ID NO: 31155 - DNA, 21 bp, Artificial Sequence
  source: /note="Description of Artificial Sequence: Synthetic oligonucleotide"
ggacactgcacaagcaaaaac

SEQ ID NO: 31156 - DNA, 21 bp, Artificial Sequence
  source: /note="Description of Artificial Sequence: Synthetic oligonucleotide"
ggacacgacctcaaaccagtc

SEQ ID NO: 31157 - DNA, 21 bp, Artificial Sequence
  source: /note="Description of Artificial Sequence: Synthetic oligonucleotide"
ggacacgaaacaagacaagaa

SEQ ID NO: 31158 - DNA, 21 bp, Artificial Sequence
  source: /note="Description of Artificial Sequence: Synthetic oligonucleotide"
ggacacggactcccaagactc

SEQ ID NO: 31159 - DNA, 21 bp, Artificial Sequence
  source: /note="Description of Artificial Sequence: Synthetic oligonucleotide"
ggacacggaccattcgtcgga

SEQ ID NO: 31160 - DNA, 21 bp, Artificial Sequence
  source: /note="Description of Artificial Sequence: Synthetic oligonucleotide"
ggacacggacaaaacccagga

SEQ ID NO: 31161 - DNA, 21 bp, Artificial Sequence
  source: /note="Description of Artificial Sequence: Synthetic oligonucleotide"
ggacaccaccaaccagaccaa

SEQ ID NO: 31162 - DNA, 21 bp, Artificial Sequence
  source: /note="Description of Artificial Sequence: Synthetic oligonucleotide"
ggacacaaagcaagaccagac

SEQ ID NO: 31163 - DNA, 21 bp, Artificial Sequence
  source: /note="Description of Artificial Sequence: Synthetic oligonucleotide"
ggacacaaagacgaaagcctc

SEQ ID NO: 31164 - DNA, 21 bp, Artificial Sequence
  source: /note="Description of Artificial Sequence: Synthetic oligonucleotide"
ggacacctcgcactccacagc

SEQ ID NO: 31165 - DNA, 21 bp, Artificial Sequence
  source: /note="Description of Artificial Sequence: Synthetic oligonucleotide"
ggacacctccaagtcaacaca

SEQ ID NO: 31166 - DNA, 21 bp, Artificial Sequence
  source: /note="Description of Artificial Sequence: Synthetic oligonucleotide"
ggacacctcagcccaagcatg

SEQ ID NO: 31167 - DNA, 21 bp, Artificial Sequence
  source: /note="Description of Artificial Sequence: Synthetic oligonucleotide"
ggacacatggcaccagtccac

SEQ ID NO: 31168 - DNA, 21 bp, Artificial Sequence
  source: /note="Description of Artificial Sequence: Synthetic oligonucleotide"
ggacacatgagcaaaacagca

SEQ ID NO: 31169 - DNA, 21 bp, Artificial Sequence
  source: /note="Description of Artificial Sequence: Synthetic oligonucleotide"
ggacaccaaggaagcgaccac

SEQ ID NO: 31170 - DNA, 21 bp, Artificial Sequence
  source: /note="Description of Artificial Sequence: Synthetic oligonucleotide"
ggacaccaaggagtcctcctc

SEQ ID NO: 31171 - DNA, 21 bp, Artificial Sequence
  source: /note="Description of Artificial Sequence: Synthetic oligonucleotide"
ggacaccaaacatacccaagc

SEQ ID NO: 31172 - DNA, 21 bp, Artificial Sequence
  source: /note="Description of Artificial Sequence: Synthetic oligonucleotide"
ggacacagaagcgaccaaagc

SEQ ID NO: 31173 - DNA, 21 bp, Artificial Sequence
  source: /note="Description of Artificial Sequence: Synthetic oligonucleotide"
ggacacagcgcaggagcaagc

SEQ ID NO: 31174 - DNA, 21 bp, Artificial Sequence
  source: /note="Description of Artificial Sequence: Synthetic oligonucleotide"
ggacacagcggagacagagca

SEQ ID NO: 31175 - DNA, 21 bp, Artificial Sequence
  source: /note="Description of Artificial Sequence: Synthetic oligonucleotide"
ggacacagccacaacgcatac

SEQ ID NO: 31176 - DNA, 21 bp, Artificial Sequence
  source: /note="Description of Artificial Sequence: Synthetic oligonucleotide"
ggacacagcagcgcaagcaac

SEQ ID NO: 31177 - DNA, 21 bp, Artificial Sequence
  source: /note="Description of Artificial Sequence: Synthetic oligonucleotide"
ggacacagcgtcacacaccca

SEQ ID NO: 31178 - DNA, 21 bp, Artificial Sequence
  source: /note="Description of Artificial Sequence: Synthetic oligonucleotide"
ggacacagcgtcgtcaaaagc

SEQ ID NO: 31179 - DNA, 21 bp, Artificial Sequence
  source: /note="Description of Artificial Sequence: Synthetic oligonucleotide"
ggacacagctacccacaagca

SEQ ID NO: 31180 - DNA, 21 bp, Artificial Sequence
  source: /note="Description of Artificial Sequence: Synthetic oligonucleotide"
ggacacacactcaaaccacca

SEQ ID NO: 31181 - DNA, 21 bp, Artificial Sequence
  source: /note="Description of Artificial Sequence: Synthetic oligonucleotide"
ggacacgtcgaaccaagatac

SEQ ID NO: 31182 - DNA, 21 bp, Artificial Sequence
  source: /note="Description of Artificial Sequence: Synthetic oligonucleotide"
ggacacgtcggaagcagagtc

SEQ ID NO: 31183 - DNA, 21 bp, Artificial Sequence
  source: /note="Description of Artificial Sequence: Synthetic oligonucleotide"
ggacacgtcctcgtcacacca

SEQ ID NO: 31184 - DNA, 21 bp, Artificial Sequence
  source: /note="Description of Artificial Sequence: Synthetic oligonucleotide"
ggacacgtcagcgtcaacaca

SEQ ID NO: 31185 - DNA, 21 bp, Artificial Sequence
  source: /note="Description of Artificial Sequence: Synthetic oligonucleotide"
ggaatcgcagacctcgcagtc

SEQ ID NO: 31186 - DNA, 21 bp, Artificial Sequence
  source: /note="Description of Artificial Sequence: Synthetic oligonucleotide"
ggaatcgcaggaggaagacca

SEQ ID NO: 31187 - DNA, 21 bp, Artificial Sequence
  source: /note="Description of Artificial Sequence: Synthetic oligonucleotide"
ggaatcgcaggaagagcaaca

SEQ ID NO: 31188 - DNA, 21 bp, Artificial Sequence
  source: /note="Description of Artificial Sequence: Synthetic oligonucleotide"
ggaatcgcaagcgaactccca

SEQ ID NO: 31189 - DNA, 21 bp, Artificial Sequence
  source: /note="Description of Artificial Sequence: Synthetic oligonucleotide"
ggaatcgcatacatgacacca

SEQ ID NO: 31190 - DNA, 21 bp, Artificial Sequence
  source: /note="Description of Artificial Sequence: Synthetic oligonucleotide"
ggaatcgacctccacacagca

SEQ ID NO: 31191 - DNA, 21 bp, Artificial Sequence
  source: /note="Description of Artificial Sequence: Synthetic oligonucleotide"
ggaatcgacaacggaacagtc

SEQ ID NO: 31192 - DNA, 21 bp, Artificial Sequence
  source: /note="Description of Artificial Sequence: Synthetic oligonucleotide"
ggaatcgaaatcgacacacaa

SEQ ID NO: 31193 - DNA, 21 bp, Artificial Sequence
  source: /note="Description of Artificial Sequence: Synthetic oligonucleotide"
ggaatcgaaagaaacagcatc

SEQ ID NO: 31194 - DNA, 21 bp, Artificial Sequence
  source: /note="Description of Artificial Sequence: Synthetic oligonucleotide"
ggaatcttcgcagcaacaagc

SEQ ID NO: 31195 - DNA, 21 bp, Artificial Sequence
  source: /note="Description of Artificial Sequence: Synthetic oligonucleotide"
ggaatcggaagcgacagagac

SEQ ID NO: 31196 - DNA, 21 bp, Artificial Sequence
  source: /note="Description of Artificial Sequence: Synthetic oligonucleotide"
ggaatcggaacacacaaccca

SEQ ID NO: 31197 - DNA, 21 bp, Artificial Sequence
  source: /note="Description of Artificial Sequence: Synthetic oligonucleotide"
ggaatccacatcaaatacgca

SEQ ID NO: 31198 - DNA, 21 bp, Artificial Sequence
  source: /note="Description of Artificial Sequence: Synthetic oligonucleotide"
ggaatcaaaatgacaatcagc

SEQ ID NO: 31199 - DNA, 21 bp, Artificial Sequence
  source: /note="Description of Artificial Sequence: Synthetic oligonucleotide"
ggaatcaactggcaaagccca

SEQ ID NO: 31200 - DNA, 21 bp, Artificial Sequence
  source: /note="Description of Artificial Sequence: Synthetic oligonucleotide"
ggaatcccaagaggagcaaca

SEQ ID NO: 31201 - DNA, 21 bp, Artificial Sequence
  source: /note="Description of Artificial Sequence: Synthetic oligonucleotide"
ggaatcccaagcaacagcaga

SEQ ID NO: 31202 - DNA, 21 bp, Artificial Sequence
  source: /note="Description of Artificial Sequence: Synthetic oligonucleotide"
ggaatcccagtcagaggagaa

SEQ ID NO: 31203 - DNA, 21 bp, Artificial Sequence
  source: /note="Description of Artificial Sequence: Synthetic oligonucleotide"
ggaatccaaacattcgcacca

SEQ ID NO: 31204 - DNA, 21 bp, Artificial Sequence
  source: /note="Description of Artificial Sequence: Synthetic oligonucleotide"
ggaatccaaacagtcatgagc

SEQ ID NO: 31205 - DNA, 21 bp, Artificial Sequence
  source: /note="Description of Artificial Sequence: Synthetic oligonucleotide"
ggaatcagagaacacccatac

SEQ ID NO: 31206 - DNA, 21 bp, Artificial Sequence
  source: /note="Description of Artificial Sequence: Synthetic oligonucleotide"
ggaatcagaatcctcgaagca

SEQ ID NO: 31207 - DNA, 21 bp, Artificial Sequence
  source: /note="Description of Artificial Sequence: Synthetic oligonucleotide"
ggaatcagaatgccagcaaac

SEQ ID NO: 31208 - DNA, 21 bp, Artificial Sequence
  source: /note="Description of Artificial Sequence: Synthetic oligonucleotide"
ggaatcagcgcaggaatcctc

SEQ ID NO: 31209 - DNA, 21 bp, Artificial Sequence
  source: /note="Description of Artificial Sequence: Synthetic oligonucleotide"
ggaatcagcggaagcacagtc

SEQ ID NO: 31210 - DNA, 21 bp, Artificial Sequence
  source: /note="Description of Artificial Sequence: Synthetic oligonucleotide"
ggaatcagcctcagcagcgca

SEQ ID NO: 31211 - DNA, 21 bp, Artificial Sequence
  source: /note="Description of Artificial Sequence: Synthetic oligonucleotide"
ggaatcagcagaacagtcgac

SEQ ID NO: 31212 - DNA, 21 bp, Artificial Sequence
  source: /note="Description of Artificial Sequence: Synthetic oligonucleotide"
ggaatcagcgtcgacgcactc

SEQ ID NO: 31213 - DNA, 21 bp, Artificial Sequence
  source: /note="Description of Artificial Sequence: Synthetic oligonucleotide"
ggaatcacaacaagccaaaga

SEQ ID NO: 31214 - DNA, 21 bp, Artificial Sequence
  source: /note="Description of Artificial Sequence: Synthetic oligonucleotide"
ggaatcgtcacaaacaacaca

SEQ ID NO: 31215 - DNA, 21 bp, Artificial Sequence
  source: /note="Description of Artificial Sequence: Synthetic oligonucleotide"
ggaatcgtcgtcacaggacca

SEQ ID NO: 31216 - DNA, 21 bp, Artificial Sequence
  source: /note="Description of Artificial Sequence: Synthetic oligonucleotide"
ggaaaagacagactcctcgca

SEQ ID NO: 31217 - DNA, 21 bp, Artificial Sequence
  source: /note="Description of Artificial Sequence: Synthetic oligonucleotide"
ggaaaagaattcagctacaca

SEQ ID NO: 31218 - DNA, 21 bp, Artificial Sequence
  source: /note="Description of Artificial Sequence: Synthetic oligonucleotide"
ggaaaattcctcccacaaaca

SEQ ID NO: 31219 - DNA, 21 bp, Artificial Sequence
  source: /note="Description of Artificial Sequence: Synthetic oligonucleotide"
ggaaaaggattcgacagccca

SEQ ID NO: 31220 - DNA, 21 bp, Artificial Sequence
  source: /note="Description of Artificial Sequence: Synthetic oligonucleotide"
ggaaaaggactcacagcaaca

SEQ ID NO: 31221 - DNA, 21 bp, Artificial Sequence
  source: /note="Description of Artificial Sequence: Synthetic oligonucleotide"
ggaaaacacgtcaaagaaatg

SEQ ID NO: 31222 - DNA, 21 bp, Artificial Sequence
  source: /note="Description of Artificial Sequence: Synthetic oligonucleotide"
ggaaaaatcagcagcagcctc

SEQ ID NO: 31223 - DNA, 21 bp, Artificial Sequence
  source: /note="Description of Artificial Sequence: Synthetic oligonucleotide"
ggaaaactcgaactcgcacca

SEQ ID NO: 31224 - DNA, 21 bp, Artificial Sequence
  source: /note="Description of Artificial Sequence: Synthetic oligonucleotide"
ggaaaactcctcatgccacaa

SEQ ID NO: 31225 - DNA, 21 bp, Artificial Sequence
  source: /note="Description of Artificial Sequence: Synthetic oligonucleotide"
ggaaaactcacaagcacactc

SEQ ID NO: 31226 - DNA, 21 bp, Artificial Sequence
  source: /note="Description of Artificial Sequence: Synthetic oligonucleotide"
ggaaaactcgtcagctacgac

SEQ ID NO: 31227 - DNA, 21 bp, Artificial Sequence
  source: /note="Description of Artificial Sequence: Synthetic oligonucleotide"
ggaaaaatgagcgtcggaaac

SEQ ID NO: 31228 - DNA, 21 bp, Artificial Sequence
  source: /note="Description of Artificial Sequence: Synthetic oligonucleotide"
ggaaaaaacgcaacattccca

SEQ ID NO: 31229 - DNA, 21 bp, Artificial Sequence
  source: /note="Description of Artificial Sequence: Synthetic oligonucleotide"
ggaaaaaacggagacagaaca

SEQ ID NO: 31230 - DNA, 21 bp, Artificial Sequence
  source: /note="Description of Artificial Sequence: Synthetic oligonucleotide"
ggaaaaccagcaggagcaatc

SEQ ID NO: 31231 - DNA, 21 bp, Artificial Sequence
  source: /note="Description of Artificial Sequence: Synthetic oligonucleotide"
ggaaaaccagcaagcccatac

SEQ ID NO: 31232 - DNA, 21 bp, Artificial Sequence
  source: /note="Description of Artificial Sequence: Synthetic oligonucleotide"
ggaaaacaaaaccaatacaca

SEQ ID NO: 31233 - DNA, 21 bp, Artificial Sequence
  source: /note="Description of Artificial Sequence: Synthetic oligonucleotide"
ggaaaacaaacaccaccaagc

SEQ ID NO: 31234 - DNA, 21 bp, Artificial Sequence
  source: /note="Description of Artificial Sequence: Synthetic oligonucleotide"
ggaaaaagagcaccagtcgac

SEQ ID NO: 31235 - DNA, 21 bp, Artificial Sequence
  source: /note="Description of Artificial Sequence: Synthetic oligonucleotide"
ggaaaaagcccaggaccactc

SEQ ID NO: 31236 - DNA, 21 bp, Artificial Sequence
  source: /note="Description of Artificial Sequence: Synthetic oligonucleotide"
ggaaaaagccaaagcggactc

SEQ ID NO: 31237 - DNA, 21 bp, Artificial Sequence
  source: /note="Description of Artificial Sequence: Synthetic oligonucleotide"
ggaaaaagcgtcacagtcagc

SEQ ID NO: 31238 - DNA, 21 bp, Artificial Sequence
  source: /note="Description of Artificial Sequence: Synthetic oligonucleotide"
ggaaaaacagaagaaagacca

SEQ ID NO: 31239 - DNA, 21 bp, Artificial Sequence
  source: /note="Description of Artificial Sequence: Synthetic oligonucleotide"
ggaaaaacaaaaccagactac

SEQ ID NO: 31240 - DNA, 21 bp, Artificial Sequence
  source: /note="Description of Artificial Sequence: Synthetic oligonucleotide"
ggaaaaacagtcgactgggga

SEQ ID NO: 31241 - DNA, 21 bp, Artificial Sequence
  source: /note="Description of Artificial Sequence: Synthetic oligonucleotide"
ggaaaaacagtcaacatcgtc

SEQ ID NO: 31242 - DNA, 21 bp, Artificial Sequence
  source: /note="Description of Artificial Sequence: Synthetic oligonucleotide"
ggaaaaacagtcgtcagcgtc

SEQ ID NO: 31243 - DNA, 21 bp, Artificial Sequence
  source: /note="Description of Artificial Sequence: Synthetic oligonucleotide"
ggaaaagtcgaattcgcaatc

SEQ ID NO: 31244 - DNA, 21 bp, Artificial Sequence
  source: /note="Description of Artificial Sequence: Synthetic oligonucleotide"
ggaaaagtccacgaaggaatg

SEQ ID NO: 31245 - DNA, 21 bp, Artificial Sequence
  source: /note="Description of Artificial Sequence: Synthetic oligonucleotide"
ggaaaagtcccaacaatcagc

SEQ ID NO: 31246 - DNA, 21 bp, Artificial Sequence
  source: /note="Description of Artificial Sequence: Synthetic oligonucleotide"
ggaaaagtcgtccaaacacca

SEQ ID NO: 31247 - DNA, 21 bp, Artificial Sequence
  source: /note="Description of Artificial Sequence: Synthetic oligonucleotide"
ggactcgcagcaaaagcagac

SEQ ID NO: 31248 - DNA, 21 bp, Artificial Sequence
  source: /note="Description of Artificial Sequence: Synthetic oligonucleotide"
ggactcgcagcaacagtccca

SEQ ID NO: 31249 - DNA, 21 bp, Artificial Sequence
  source: /note="Description of Artificial Sequence: Synthetic oligonucleotide"
ggactcgcacaccaaggaaca

SEQ ID NO: 31250 - DNA, 21 bp, Artificial Sequence
  source: /note="Description of Artificial Sequence: Synthetic oligonucleotide"
ggactcgcaaaatacgcagaa

SEQ ID NO: 31251 - DNA, 21 bp, Artificial Sequence
  source: /note="Description of Artificial Sequence: Synthetic oligonucleotide"
ggactcgcactcagcagccca

SEQ ID NO: 31252 - DNA, 21 bp, Artificial Sequence
  source: /note="Description of Artificial Sequence: Synthetic oligonucleotide"
ggactcgcaaacagcccaagc

SEQ ID NO: 31253 - DNA, 21 bp, Artificial Sequence
  source: /note="Description of Artificial Sequence: Synthetic oligonucleotide"
ggactcgcagtcggaacaaga

SEQ ID NO: 31254 - DNA, 21 bp, Artificial Sequence
  source: /note="Description of Artificial Sequence: Synthetic oligonucleotide"
ggactcgaacaccacgtcaca

SEQ ID NO: 31255 - DNA, 21 bp, Artificial Sequence
  source: /note="Description of Artificial Sequence: Synthetic oligonucleotide"
ggactcggagcaccagaaaga

SEQ ID NO: 31256 - DNA, 21 bp, Artificial Sequence
  source: /note="Description of Artificial Sequence: Synthetic oligonucleotide"
ggactcggactcgtcacagga

SEQ ID NO: 31257 - DNA, 21 bp, Artificial Sequence
  source: /note="Description of Artificial Sequence: Synthetic oligonucleotide"
ggactcggaatgccacaaagc

SEQ ID NO: 31258 - DNA, 21 bp, Artificial Sequence
  source: /note="Description of Artificial Sequence: Synthetic oligonucleotide"
ggactcggaagcacactcgga

SEQ ID NO: 31259 - DNA, 21 bp, Artificial Sequence
  source: /note="Description of Artificial Sequence: Synthetic oligonucleotide"
ggactcggaacagcaagcgca

SEQ ID NO: 31260 - DNA, 21 bp, Artificial Sequence
  source: /note="Description of Artificial Sequence: Synthetic oligonucleotide"
ggactcggaacaatggtcatc

SEQ ID NO: 31261 - DNA, 21 bp, Artificial Sequence
  source: /note="Description of Artificial Sequence: Synthetic oligonucleotide"
ggactcggaacaccaagccca

SEQ ID NO: 31262 - DNA, 21 bp, Artificial Sequence
  source: /note="Description of Artificial Sequence: Synthetic oligonucleotide"
ggactcggaacaacaggaaga

SEQ ID NO: 31263 - DNA, 21 bp, Artificial Sequence
  source: /note="Description of Artificial Sequence: Synthetic oligonucleotide"
ggactccacgacccaccagtc

SEQ ID NO: 31264 - DNA, 21 bp, Artificial Sequence
  source: /note="Description of Artificial Sequence: Synthetic oligonucleotide"
ggactccacctcatggacgtc

SEQ ID NO: 31265 - DNA, 21 bp, Artificial Sequence
  source: /note="Description of Artificial Sequence: Synthetic oligonucleotide"
ggactcatcagccaaacagac

SEQ ID NO: 31266 - DNA, 21 bp, Artificial Sequence
  source: /note="Description of Artificial Sequence: Synthetic oligonucleotide"
ggactcaaagcagtcgacgga

SEQ ID NO: 31267 - DNA, 21 bp, Artificial Sequence
  source: /note="Description of Artificial Sequence: Synthetic oligonucleotide"
ggactcaaaatcacaacagaa

SEQ ID NO: 31268 - DNA, 21 bp, Artificial Sequence
  source: /note="Description of Artificial Sequence: Synthetic oligonucleotide"
ggactcaaaaacccacaaatg

SEQ ID NO: 31269 - DNA, 21 bp, Artificial Sequence
  source: /note="Description of Artificial Sequence: Synthetic oligonucleotide"
ggactcaaaagcacaatcaac

SEQ ID NO: 31270 - DNA, 21 bp, Artificial Sequence
  source: /note="Description of Artificial Sequence: Synthetic oligonucleotide"
ggactcctcggagaaaaaagc

SEQ ID NO: 31271 - DNA, 21 bp, Artificial Sequence
  source: /note="Description of Artificial Sequence: Synthetic oligonucleotide"
ggactcctcggaagatacgaa

SEQ ID NO: 31272 - DNA, 21 bp, Artificial Sequence
  source: /note="Description of Artificial Sequence: Synthetic oligonucleotide"
ggactcctcggaacaaaactc

SEQ ID NO: 31273 - DNA, 21 bp, Artificial Sequence
  source: /note="Description of Artificial Sequence: Synthetic oligonucleotide"
ggactcctcagcagagcagaa

SEQ ID NO: 31274 - DNA, 21 bp, Artificial Sequence
  source: /note="Description of Artificial Sequence: Synthetic oligonucleotide"
ggactcctcgtcctctaccca

SEQ ID NO: 31275 - DNA, 21 bp, Artificial Sequence
  source: /note="Description of Artificial Sequence: Synthetic oligonucleotide"
ggactcatggcacacagaaac

SEQ ID NO: 31276 - DNA, 21 bp, Artificial Sequence
  source: /note="Description of Artificial Sequence: Synthetic oligonucleotide"
ggactcatgctcatgaacgga

SEQ ID NO: 31277 - DNA, 21 bp, Artificial Sequence
  source: /note="Description of Artificial Sequence: Synthetic oligonucleotide"
ggactcaacccaggaacacac

SEQ ID NO: 31278 - DNA, 21 bp, Artificial Sequence
  source: /note="Description of Artificial Sequence: Synthetic oligonucleotide"
ggactcaacagattcagcgga

SEQ ID NO: 31279 - DNA, 21 bp, Artificial Sequence
  source: /note="Description of Artificial Sequence: Synthetic oligonucleotide"
ggactcaacgtcacaaaattc

SEQ ID NO: 31280 - DNA, 21 bp, Artificial Sequence
  source: /note="Description of Artificial Sequence: Synthetic oligonucleotide"
ggactcccaggagaactcgca

SEQ ID NO: 31281 - DNA, 21 bp, Artificial Sequence
  source: /note="Description of Artificial Sequence: Synthetic oligonucleotide"
ggactcccaggaggaagaagc

SEQ ID NO: 31282 - DNA, 21 bp, Artificial Sequence
  source: /note="Description of Artificial Sequence: Synthetic oligonucleotide"
ggactcccaggaagacacgca

SEQ ID NO: 31283 - DNA, 21 bp, Artificial Sequence
  source: /note="Description of Artificial Sequence: Synthetic oligonucleotide"
ggactcccacacagatacgaa

SEQ ID NO: 31284 - DNA, 21 bp, Artificial Sequence
  source: /note="Description of Artificial Sequence: Synthetic oligonucleotide"
ggactcccaatcccaagcctc

SEQ ID NO: 31285 - DNA, 21 bp, Artificial Sequence
  source: /note="Description of Artificial Sequence: Synthetic oligonucleotide"
ggactcccaaaacacccacca

SEQ ID NO: 31286 - DNA, 21 bp, Artificial Sequence
  source: /note="Description of Artificial Sequence: Synthetic oligonucleotide"
ggactcccaatggcaacagca

SEQ ID NO: 31287 - DNA, 21 bp, Artificial Sequence
  source: /note="Description of Artificial Sequence: Synthetic oligonucleotide"
ggactcccaaacagagaacca

SEQ ID NO: 31288 - DNA, 21 bp, Artificial Sequence
  source: /note="Description of Artificial Sequence: Synthetic oligonucleotide"
ggactcccaccagcaagcaaa

SEQ ID NO: 31289 - DNA, 21 bp, Artificial Sequence
  source: /note="Description of Artificial Sequence: Synthetic oligonucleotide"
ggactcccacaagcaagccac

SEQ ID NO: 31290 - DNA, 21 bp, Artificial Sequence
  source: /note="Description of Artificial Sequence: Synthetic oligonucleotide"
ggactcccacaacacaaacaa

SEQ ID NO: 31291 - DNA, 21 bp, Artificial Sequence
  source: /note="Description of Artificial Sequence: Synthetic oligonucleotide"
ggactcccaagcaacctcaca

SEQ ID NO: 31292 - DNA, 21 bp, Artificial Sequence
  source: /note="Description of Artificial Sequence: Synthetic oligonucleotide"
ggactcccaacagaagacaga

SEQ ID NO: 31293 - DNA, 21 bp, Artificial Sequence
  source: /note="Description of Artificial Sequence: Synthetic oligonucleotide"
ggactcccatacggaaacagc

SEQ ID NO: 31294 - DNA, 21 bp, Artificial Sequence
  source: /note="Description of Artificial Sequence: Synthetic oligonucleotide"
ggactccaacaagaagtcaga

SEQ ID NO: 31295 - DNA, 21 bp, Artificial Sequence
  source: /note="Description of Artificial Sequence: Synthetic oligonucleotide"
ggactccaaagcacaggactc

SEQ ID NO: 31296 - DNA, 21 bp, Artificial Sequence
  source: /note="Description of Artificial Sequence: Synthetic oligonucleotide"
ggactcagagaaccagtcgca

SEQ ID NO: 31297 - DNA, 21 bp, Artificial Sequence
  source: /note="Description of Artificial Sequence: Synthetic oligonucleotide"
ggactcagattcacagtcgaa

SEQ ID NO: 31298 - DNA, 21 bp, Artificial Sequence
  source: /note="Description of Artificial Sequence: Synthetic oligonucleotide"
ggactcagaaacctcggaagc

SEQ ID NO: 31299 - DNA, 21 bp, Artificial Sequence
  source: /note="Description of Artificial Sequence: Synthetic oligonucleotide"
ggactcagaaaccaagaactc

SEQ ID NO: 31300 - DNA, 21 bp, Artificial Sequence
  source: /note="Description of Artificial Sequence: Synthetic oligonucleotide"
ggactcagaccaggacaagac

SEQ ID NO: 31301 - DNA, 21 bp, Artificial Sequence
  source: /note="Description of Artificial Sequence: Synthetic oligonucleotide"
ggactcagaagcctcagcgca

SEQ ID NO: 31302 - DNA, 21 bp, Artificial Sequence
  source: /note="Description of Artificial Sequence: Synthetic oligonucleotide"
ggactcagaagcatgccagaa

SEQ ID NO: 31303 - DNA, 21 bp, Artificial Sequence
  source: /note="Description of Artificial Sequence: Synthetic oligonucleotide"
ggactcagaagcagctacgca

SEQ ID NO: 31304 - DNA, 21 bp, Artificial Sequence
  source: /note="Description of Artificial Sequence: Synthetic oligonucleotide"
ggactcagaacagcaagcaac

SEQ ID NO: 31305 - DNA, 21 bp, Artificial Sequence
  source: /note="Description of Artificial Sequence: Synthetic oligonucleotide"
ggactcagaacagacatgctc

SEQ ID NO: 31306 - DNA, 21 bp, Artificial Sequence
  source: /note="Description of Artificial Sequence: Synthetic oligonucleotide"
ggactcagcgcagcagcaaca

SEQ ID NO: 31307 - DNA, 21 bp, Artificial Sequence
  source: /note="Description of Artificial Sequence: Synthetic oligonucleotide"
ggactcagcgcactcgcaagc

SEQ ID NO: 31308 - DNA, 21 bp, Artificial Sequence
  source: /note="Description of Artificial Sequence: Synthetic oligonucleotide"
ggactcagcgcatacatccca

SEQ ID NO: 31309 - DNA, 21 bp, Artificial Sequence
  source: /note="Description of Artificial Sequence: Synthetic oligonucleotide"
ggactcagccacagcgcactc

SEQ ID NO: 31310 - DNA, 21 bp, Artificial Sequence
  source: /note="Description of Artificial Sequence: Synthetic oligonucleotide"
ggactcagcctcgacgactac

SEQ ID NO: 31311 - DNA, 21 bp, Artificial Sequence
  source: /note="Description of Artificial Sequence: Synthetic oligonucleotide"
ggactcagcctcaaatacgga

SEQ ID NO: 31312 - DNA, 21 bp, Artificial Sequence
  source: /note="Description of Artificial Sequence: Synthetic oligonucleotide"
ggactcagcctcctcagaaac

SEQ ID NO: 31313 - DNA, 21 bp, Artificial Sequence
  source: /note="Description of Artificial Sequence: Synthetic oligonucleotide"
ggactcagcatgccactccca

SEQ ID NO: 31314 - DNA, 21 bp, Artificial Sequence
  source: /note="Description of Artificial Sequence: Synthetic oligonucleotide"
ggactcagcccaagacaaaca

SEQ ID NO: 31315 - DNA, 21 bp, Artificial Sequence
  source: /note="Description of Artificial Sequence: Synthetic oligonucleotide"
ggactcagcagagcaccacca

SEQ ID NO: 31316 - DNA, 21 bp, Artificial Sequence
  source: /note="Description of Artificial Sequence: Synthetic oligonucleotide"
ggactcagcagccaccaccca

SEQ ID NO: 31317 - DNA, 21 bp, Artificial Sequence
  source: /note="Description of Artificial Sequence: Synthetic oligonucleotide"
ggactcagcacaaaaacaagc

SEQ ID NO: 31318 - DNA, 21 bp, Artificial Sequence
  source: /note="Description of Artificial Sequence: Synthetic oligonucleotide"
ggactcagcacagtcctcatg

SEQ ID NO: 31319 - DNA, 21 bp, Artificial Sequence
  source: /note="Description of Artificial Sequence: Synthetic oligonucleotide"
ggactcagcgtcacaagagtc

SEQ ID NO: 31320 - DNA, 21 bp, Artificial Sequence
  source: /note="Description of Artificial Sequence: Synthetic oligonucleotide"
ggactcacacacgtcgtccaa

SEQ ID NO: 31321 - DNA, 21 bp, Artificial Sequence
  source: /note="Description of Artificial Sequence: Synthetic oligonucleotide"
ggactcacactcgacctcaga

SEQ ID NO: 31322 - DNA, 21 bp, Artificial Sequence
  source: /note="Description of Artificial Sequence: Synthetic oligonucleotide"
ggactcacactcgtcccagca

SEQ ID NO: 31323 - DNA, 21 bp, Artificial Sequence
  source: /note="Description of Artificial Sequence: Synthetic oligonucleotide"
ggactcacaaacacaggaagc

SEQ ID NO: 31324 - DNA, 21 bp, Artificial Sequence
  source: /note="Description of Artificial Sequence: Synthetic oligonucleotide"
ggactcacaccagaccacgga

SEQ ID NO: 31325 - DNA, 21 bp, Artificial Sequence
  source: /note="Description of Artificial Sequence: Synthetic oligonucleotide"
ggactcacacaaccaggacca

SEQ ID NO: 31326 - DNA, 21 bp, Artificial Sequence
  source: /note="Description of Artificial Sequence: Synthetic oligonucleotide"
ggactcacaagccacccaatc

SEQ ID NO: 31327 - DNA, 21 bp, Artificial Sequence
  source: /note="Description of Artificial Sequence: Synthetic oligonucleotide"
ggactcacatacgcactcaca

SEQ ID NO: 31328 - DNA, 21 bp, Artificial Sequence
  source: /note="Description of Artificial Sequence: Synthetic oligonucleotide"
ggactcgtcgcacacacaatc

SEQ ID NO: 31329 - DNA, 21 bp, Artificial Sequence
  source: /note="Description of Artificial Sequence: Synthetic oligonucleotide"
ggactcgtcggaagagtccaa

SEQ ID NO: 31330 - DNA, 21 bp, Artificial Sequence
  source: /note="Description of Artificial Sequence: Synthetic oligonucleotide"
ggactcgtcatcggagtcgca

SEQ ID NO: 31331 - DNA, 21 bp, Artificial Sequence
  source: /note="Description of Artificial Sequence: Synthetic oligonucleotide"
ggactcgtcccaacagacgca

SEQ ID NO: 31332 - DNA, 21 bp, Artificial Sequence
  source: /note="Description of Artificial Sequence: Synthetic oligonucleotide"
ggactcgtcagcacacacgac

SEQ ID NO: 31333 - DNA, 21 bp, Artificial Sequence
  source: /note="Description of Artificial Sequence: Synthetic oligonucleotide"
ggactctacgacacaagaagc

SEQ ID NO: 31334 - DNA, 21 bp, Artificial Sequence
  source: /note="Description of Artificial Sequence: Synthetic oligonucleotide"
ggactctaccacctcaacgca

SEQ ID NO: 31335 - DNA, 21 bp, Artificial Sequence
  source: /note="Description of Artificial Sequence: Synthetic oligonucleotide"
ggactctacaacacaagcaca

SEQ ID NO: 31336 - DNA, 21 bp, Artificial Sequence
  source: /note="Description of Artificial Sequence: Synthetic oligonucleotide"
ggactctacccaaacttcaca

SEQ ID NO: 31337 - DNA, 21 bp, Artificial Sequence
  source: /note="Description of Artificial Sequence: Synthetic oligonucleotide"
ggaatggcagcaggacacagc

SEQ ID NO: 31338 - DNA, 21 bp, Artificial Sequence
  source: /note="Description of Artificial Sequence: Synthetic oligonucleotide"
ggaatggcagcaacagcaagc

SEQ ID NO: 31339 - DNA, 21 bp, Artificial Sequence
  source: /note="Description of Artificial Sequence: Synthetic oligonucleotide"
ggaatggcaggaatcagagac

SEQ ID NO: 31340 - DNA, 21 bp, Artificial Sequence
  source: /note="Description of Artificial Sequence: Synthetic oligonucleotide"
ggaatggcaatgacactcagc

SEQ ID NO: 31341 - DNA, 21 bp, Artificial Sequence
  source: /note="Description of Artificial Sequence: Synthetic oligonucleotide"
ggaatggcaacaggagtcgac

SEQ ID NO: 31342 - DNA, 21 bp, Artificial Sequence
  source: /note="Description of Artificial Sequence: Synthetic oligonucleotide"
ggaatggaccaagtcctcaga

SEQ ID NO: 31343 - DNA, 21 bp, Artificial Sequence
  source: /note="Description of Artificial Sequence: Synthetic oligonucleotide"
ggaatgggaacagcatacgga

SEQ ID NO: 31344 - DNA, 21 bp, Artificial Sequence
  source: /note="Description of Artificial Sequence: Synthetic oligonucleotide"
ggaatgaaaccaccagtcgac

SEQ ID NO: 31345 - DNA, 21 bp, Artificial Sequence
  source: /note="Description of Artificial Sequence: Synthetic oligonucleotide"
ggaatgctcagagcagtcagc

SEQ ID NO: 31346 - DNA, 21 bp, Artificial Sequence
  source: /note="Description of Artificial Sequence: Synthetic oligonucleotide"
ggaatgaacaacacagtcaga

SEQ ID NO: 31347 - DNA, 21 bp, Artificial Sequence
  source: /note="Description of Artificial Sequence: Synthetic oligonucleotide"
ggaatgaacagcagcctcgtc

SEQ ID NO: 31348 - DNA, 21 bp, Artificial Sequence
  source: /note="Description of Artificial Sequence: Synthetic oligonucleotide"
ggaatgccacacctcccacca

SEQ ID NO: 31349 - DNA, 21 bp, Artificial Sequence
  source: /note="Description of Artificial Sequence: Synthetic oligonucleotide"
ggaatgccaatcccaagcaac

SEQ ID NO: 31350 - DNA, 21 bp, Artificial Sequence
  source: /note="Description of Artificial Sequence: Synthetic oligonucleotide"
ggaatgagagacctccaacca

SEQ ID NO: 31351 - DNA, 21 bp, Artificial Sequence
  source: /note="Description of Artificial Sequence: Synthetic oligonucleotide"
ggaatgagacaaacacaagca

SEQ ID NO: 31352 - DNA, 21 bp, Artificial Sequence
  source: /note="Description of Artificial Sequence: Synthetic oligonucleotide"
ggaatgagcatgatcacaaga

SEQ ID NO: 31353 - DNA, 21 bp, Artificial Sequence
  source: /note="Description of Artificial Sequence: Synthetic oligonucleotide"
ggaatgagccaaggaagctac

SEQ ID NO: 31354 - DNA, 21 bp, Artificial Sequence
  source: /note="Description of Artificial Sequence: Synthetic oligonucleotide"
ggaatgagcagaagcttcagc

SEQ ID NO: 31355 - DNA, 21 bp, Artificial Sequence
  source: /note="Description of Artificial Sequence: Synthetic oligonucleotide"
ggaatgagcagcgcactcagc

SEQ ID NO: 31356 - DNA, 21 bp, Artificial Sequence
  source: /note="Description of Artificial Sequence: Synthetic oligonucleotide"
ggaatgagcgtcccaatggac

SEQ ID NO: 31357 - DNA, 21 bp, Artificial Sequence
  source: /note="Description of Artificial Sequence: Synthetic oligonucleotide"
ggaatgacaagaccacaagtc

SEQ ID NO: 31358 - DNA, 21 bp, Artificial Sequence
  source: /note="Description of Artificial Sequence: Synthetic oligonucleotide"
ggaaacgcagcaacactcaga

SEQ ID NO: 31359 - DNA, 21 bp, Artificial Sequence
  source: /note="Description of Artificial Sequence: Synthetic oligonucleotide"
ggaaacgcaagaccaatcaca

SEQ ID NO: 31360 - DNA, 21 bp, Artificial Sequence
  source: /note="Description of Artificial Sequence: Synthetic oligonucleotide"
ggaaacgcaagcccacaaatg

SEQ ID NO: 31361 - DNA, 21 bp, Artificial Sequence
  source: /note="Description of Artificial Sequence: Synthetic oligonucleotide"
ggaaacgcagtcggaggagac

SEQ ID NO: 31362 - DNA, 21 bp, Artificial Sequence
  source: /note="Description of Artificial Sequence: Synthetic oligonucleotide"
ggaaacgacgacagcaaatac

SEQ ID NO: 31363 - DNA, 21 bp, Artificial Sequence
  source: /note="Description of Artificial Sequence: Synthetic oligonucleotide"
ggaaacttccaaaaaaacgca

SEQ ID NO: 31364 - DNA, 21 bp, Artificial Sequence
  source: /note="Description of Artificial Sequence: Synthetic oligonucleotide"
ggaaacggaagaggattccaa

SEQ ID NO: 31365 - DNA, 21 bp, Artificial Sequence
  source: /note="Description of Artificial Sequence: Synthetic oligonucleotide"
ggaaacggaacaccagaacac

SEQ ID NO: 31366 - DNA, 21 bp, Artificial Sequence
  source: /note="Description of Artificial Sequence: Synthetic oligonucleotide"
ggaaaccacgcattccacgca

SEQ ID NO: 31367 - DNA, 21 bp, Artificial Sequence
  source: /note="Description of Artificial Sequence: Synthetic oligonucleotide"
ggaaaccacctccacctctgc

SEQ ID NO: 31368 - DNA, 21 bp, Artificial Sequence
  source: /note="Description of Artificial Sequence: Synthetic oligonucleotide"
ggaaaccacgtcctccaacca

SEQ ID NO: 31369 - DNA, 21 bp, Artificial Sequence
  source: /note="Description of Artificial Sequence: Synthetic oligonucleotide"
ggaaacctcctcacaatcagc

SEQ ID NO: 31370 - DNA, 21 bp, Artificial Sequence
  source: /note="Description of Artificial Sequence: Synthetic oligonucleotide"
ggaaacctcagccaaagattc

SEQ ID NO: 31371 - DNA, 21 bp, Artificial Sequence
  source: /note="Description of Artificial Sequence: Synthetic oligonucleotide"
ggaaacatgcacacactcaca

SEQ ID NO: 31372 - DNA, 21 bp, Artificial Sequence
  source: /note="Description of Artificial Sequence: Synthetic oligonucleotide"
ggaaacccactcaaaccacaa

SEQ ID NO: 31373 - DNA, 21 bp, Artificial Sequence
  source: /note="Description of Artificial Sequence: Synthetic oligonucleotide"
ggaaacagagaagcactcgca

SEQ ID NO: 31374 - DNA, 21 bp, Artificial Sequence
  source: /note="Description of Artificial Sequence: Synthetic oligonucleotide"
ggaaacagaaacagcaacgtc

SEQ ID NO: 31375 - DNA, 21 bp, Artificial Sequence
  source: /note="Description of Artificial Sequence: Synthetic oligonucleotide"
ggaaacagcgcaatgaacagc

SEQ ID NO: 31376 - DNA, 21 bp, Artificial Sequence
  source: /note="Description of Artificial Sequence: Synthetic oligonucleotide"
ggaaacagcgaccaaacaaga

SEQ ID NO: 31377 - DNA, 21 bp, Artificial Sequence
  source: /note="Description of Artificial Sequence: Synthetic oligonucleotide"
ggaaacagcctcgcaccacaa

SEQ ID NO: 31378 - DNA, 21 bp, Artificial Sequence
  source: /note="Description of Artificial Sequence: Synthetic oligonucleotide"
ggaaacagcagcgcaggaaac

SEQ ID NO: 31379 - DNA, 21 bp, Artificial Sequence
  source: /note="Description of Artificial Sequence: Synthetic oligonucleotide"
ggaaacagcagccacagcgac

SEQ ID NO: 31380 - DNA, 21 bp, Artificial Sequence
  source: /note="Description of Artificial Sequence: Synthetic oligonucleotide"
ggaaacagcacagtcgaccca

SEQ ID NO: 31381 - DNA, 21 bp, Artificial Sequence
  source: /note="Description of Artificial Sequence: Synthetic oligonucleotide"
ggaaacagcgtcccacacaac

SEQ ID NO: 31382 - DNA, 21 bp, Artificial Sequence
  source: /note="Description of Artificial Sequence: Synthetic oligonucleotide"
ggaaacagcgtccaacacaga

SEQ ID NO: 31383 - DNA, 21 bp, Artificial Sequence
  source: /note="Description of Artificial Sequence: Synthetic oligonucleotide"
ggaaacacagcaccacaaagc

SEQ ID NO: 31384 - DNA, 21 bp, Artificial Sequence
  source: /note="Description of Artificial Sequence: Synthetic oligonucleotide"
ggaaacacacacaacatgcaa

SEQ ID NO: 31385 - DNA, 21 bp, Artificial Sequence
  source: /note="Description of Artificial Sequence: Synthetic oligonucleotide"
ggaaacacaaaaagcccagga

SEQ ID NO: 31386 - DNA, 21 bp, Artificial Sequence
  source: /note="Description of Artificial Sequence: Synthetic oligonucleotide"
ggaaacacaaacagaaacgga

SEQ ID NO: 31387 - DNA, 21 bp, Artificial Sequence
  source: /note="Description of Artificial Sequence: Synthetic oligonucleotide"
ggaaacacaagcagcagagca

SEQ ID NO: 31388 - DNA, 21 bp, Artificial Sequence
  source: /note="Description of Artificial Sequence: Synthetic oligonucleotide"
ggaaacacagtcagaatccca

SEQ ID NO: 31389 - DNA, 21 bp, Artificial Sequence
  source: /note="Description of Artificial Sequence: Synthetic oligonucleotide"
ggaaacgtcctcagagtcgtc

SEQ ID NO: 31390 - DNA, 21 bp, Artificial Sequence
  source: /note="Description of Artificial Sequence: Synthetic oligonucleotide"
ggaaacgtcacaaaaggactc

SEQ ID NO: 31391 - DNA, 21 bp, Artificial Sequence
  source: /note="Description of Artificial Sequence: Synthetic oligonucleotide"
ggaaactacatcctcaaacca

SEQ ID NO: 31392 - DNA, 21 bp, Artificial Sequence
  source: /note="Description of Artificial Sequence: Synthetic oligonucleotide"
ggaaactacatcagcgcaagc

SEQ ID NO: 31393 - DNA, 21 bp, Artificial Sequence
  source: /note="Description of Artificial Sequence: Synthetic oligonucleotide"
ggaaactacaacctcgacctc

SEQ ID NO: 31394 - DNA, 21 bp, Artificial Sequence
  source: /note="Description of Artificial Sequence: Synthetic oligonucleotide"
ggaaactacagcagcgaagtc

SEQ ID NO: 31395 - DNA, 21 bp, Artificial Sequence
  source: /note="Description of Artificial Sequence: Synthetic oligonucleotide"
ggaccagcagcagacgtcaga

SEQ ID NO: 31396 - DNA, 21 bp, Artificial Sequence
  source: /note="Description of Artificial Sequence: Synthetic oligonucleotide"
ggaccagcactcctcatggac

SEQ ID NO: 31397 - DNA, 21 bp, Artificial Sequence
  source: /note="Description of Artificial Sequence: Synthetic oligonucleotide"
ggaccagcactcccaatcgca

SEQ ID NO: 31398 - DNA, 21 bp, Artificial Sequence
  source: /note="Description of Artificial Sequence: Synthetic oligonucleotide"
ggaccagcaatgggaagcctc

SEQ ID NO: 31399 - DNA, 21 bp, Artificial Sequence
  source: /note="Description of Artificial Sequence: Synthetic oligonucleotide"
ggaccagcaccaagcatcagc

SEQ ID NO: 31400 - DNA, 21 bp, Artificial Sequence
  source: /note="Description of Artificial Sequence: Synthetic oligonucleotide"
ggaccagcacaaagactccaa

SEQ ID NO: 31401 - DNA, 21 bp, Artificial Sequence
  source: /note="Description of Artificial Sequence: Synthetic oligonucleotide"
ggaccagcaagcatcgtcagc

SEQ ID NO: 31402 - DNA, 21 bp, Artificial Sequence
  source: /note="Description of Artificial Sequence: Synthetic oligonucleotide"
ggaccagcaacacacctcaca

SEQ ID NO: 31403 - DNA, 21 bp, Artificial Sequence
  source: /note="Description of Artificial Sequence: Synthetic oligonucleotide"
ggaccagacctcacaacagga

SEQ ID NO: 31404 - DNA, 21 bp, Artificial Sequence
  source: /note="Description of Artificial Sequence: Synthetic oligonucleotide"
ggaccagaccaagaagaacac

SEQ ID NO: 31405 - DNA, 21 bp, Artificial Sequence
  source: /note="Description of Artificial Sequence: Synthetic oligonucleotide"
ggaccagaagcaatgtacaaa

SEQ ID NO: 31406 - DNA, 21 bp, Artificial Sequence
  source: /note="Description of Artificial Sequence: Synthetic oligonucleotide"
ggaccagaacaagacatcatg

SEQ ID NO: 31407 - DNA, 21 bp, Artificial Sequence
  source: /note="Description of Artificial Sequence: Synthetic oligonucleotide"
ggaccagaatgggtcacagga

SEQ ID NO: 31408 - DNA, 21 bp, Artificial Sequence
  source: /note="Description of Artificial Sequence: Synthetic oligonucleotide"
ggaccattcgaacaaacagac

SEQ ID NO: 31409 - DNA, 21 bp, Artificial Sequence
  source: /note="Description of Artificial Sequence: Synthetic oligonucleotide"
ggaccaggagcaatccactac

SEQ ID NO: 31410 - DNA, 21 bp, Artificial Sequence
  source: /note="Description of Artificial Sequence: Synthetic oligonucleotide"
ggaccaggaatcgcaagcttc

SEQ ID NO: 31411 - DNA, 21 bp, Artificial Sequence
  source: /note="Description of Artificial Sequence: Synthetic oligonucleotide"
ggaccaggaaaagaaacaaga

SEQ ID NO: 31412 - DNA, 21 bp, Artificial Sequence
  source: /note="Description of Artificial Sequence: Synthetic oligonucleotide"
ggaccaggaatgctctgcgca

SEQ ID NO: 31413 - DNA, 21 bp, Artificial Sequence
  source: /note="Description of Artificial Sequence: Synthetic oligonucleotide"
ggaccaggaccaatcggaagc

SEQ ID NO: 31414 - DNA, 21 bp, Artificial Sequence
  source: /note="Description of Artificial Sequence: Synthetic oligonucleotide"
ggaccaggaagcttcagacca

SEQ ID NO: 31415 - DNA, 21 bp, Artificial Sequence
  source: /note="Description of Artificial Sequence: Synthetic oligonucleotide"
ggaccaggaagcagcagcatg

SEQ ID NO: 31416 - DNA, 21 bp, Artificial Sequence
  source: /note="Description of Artificial Sequence: Synthetic oligonucleotide"
ggaccacacatcagaatcgca

SEQ ID NO: 31417 - DNA, 21 bp, Artificial Sequence
  source: /note="Description of Artificial Sequence: Synthetic oligonucleotide"
ggaccacacctcgtccaacac

SEQ ID NO: 31418 - DNA, 21 bp, Artificial Sequence
  source: /note="Description of Artificial Sequence: Synthetic oligonucleotide"
ggaccacacacaagcatgatc

SEQ ID NO: 31419 - DNA, 21 bp, Artificial Sequence
  source: /note="Description of Artificial Sequence: Synthetic oligonucleotide"
ggaccacactacaacgaccca

SEQ ID NO: 31420 - DNA, 21 bp, Artificial Sequence
  source: /note="Description of Artificial Sequence: Synthetic oligonucleotide"
ggaccaatcgaactcacactc

SEQ ID NO: 31421 - DNA, 21 bp, Artificial Sequence
  source: /note="Description of Artificial Sequence: Synthetic oligonucleotide"
ggaccaaaactcacaccagtc

SEQ ID NO: 31422 - DNA, 21 bp, Artificial Sequence
  source: /note="Description of Artificial Sequence: Synthetic oligonucleotide"
ggaccaaaaatggaaccacac

SEQ ID NO: 31423 - DNA, 21 bp, Artificial Sequence
  source: /note="Description of Artificial Sequence: Synthetic oligonucleotide"
ggaccactcctcgtcagagga

SEQ ID NO: 31424 - DNA, 21 bp, Artificial Sequence
  source: /note="Description of Artificial Sequence: Synthetic oligonucleotide"
ggaccactcaacagcgtcatg

SEQ ID NO: 31425 - DNA, 21 bp, Artificial Sequence
  source: /note="Description of Artificial Sequence: Synthetic oligonucleotide"
ggaccactcccagaaggacac

SEQ ID NO: 31426 - DNA, 21 bp, Artificial Sequence
  source: /note="Description of Artificial Sequence: Synthetic oligonucleotide"
ggaccactcccaccaacaaca

SEQ ID NO: 31427 - DNA, 21 bp, Artificial Sequence
  source: /note="Description of Artificial Sequence: Synthetic oligonucleotide"
ggaccactcccagtcgcaaca

SEQ ID NO: 31428 - DNA, 21 bp, Artificial Sequence
  source: /note="Description of Artificial Sequence: Synthetic oligonucleotide"
ggaccactcagcgcaatgcca

SEQ ID NO: 31429 - DNA, 21 bp, Artificial Sequence
  source: /note="Description of Artificial Sequence: Synthetic oligonucleotide"
ggaccactcagcaacgtcaaa

SEQ ID NO: 31430 - DNA, 21 bp, Artificial Sequence
  source: /note="Description of Artificial Sequence: Synthetic oligonucleotide"
ggaccactcgtctacgcagac

SEQ ID NO: 31431 - DNA, 21 bp, Artificial Sequence
  source: /note="Description of Artificial Sequence: Synthetic oligonucleotide"
ggaccaatgcaaatgccaagc

SEQ ID NO: 31432 - DNA, 21 bp, Artificial Sequence
  source: /note="Description of Artificial Sequence: Synthetic oligonucleotide"
ggaccaatgagagaaatggaa

SEQ ID NO: 31433 - DNA, 21 bp, Artificial Sequence
  source: /note="Description of Artificial Sequence: Synthetic oligonucleotide"
ggaccaatgtacgcaaaccca

SEQ ID NO: 31434 - DNA, 21 bp, Artificial Sequence
  source: /note="Description of Artificial Sequence: Synthetic oligonucleotide"
ggaccaaacgacgtccaaaaa

SEQ ID NO: 31435 - DNA, 21 bp, Artificial Sequence
  source: /note="Description of Artificial Sequence: Synthetic oligonucleotide"
ggaccaaacttcctcctccca

SEQ ID NO: 31436 - DNA, 21 bp, Artificial Sequence
  source: /note="Description of Artificial Sequence: Synthetic oligonucleotide"
ggaccaaacggagcagtcgga

SEQ ID NO: 31437 - DNA, 21 bp, Artificial Sequence
  source: /note="Description of Artificial Sequence: Synthetic oligonucleotide"
ggaccaaacatgagaaacgga

SEQ ID NO: 31438 - DNA, 21 bp, Artificial Sequence
  source: /note="Description of Artificial Sequence: Synthetic oligonucleotide"
ggaccaaacagaggaagcctc

SEQ ID NO: 31439 - DNA, 21 bp, Artificial Sequence
  source: /note="Description of Artificial Sequence: Synthetic oligonucleotide"
ggaccaaacagactcacagtc

SEQ ID NO: 31440 - DNA, 21 bp, Artificial Sequence
  source: /note="Description of Artificial Sequence: Synthetic oligonucleotide"
ggaccaaacgtcctcagccca

SEQ ID NO: 31441 - DNA, 21 bp, Artificial Sequence
  source: /note="Description of Artificial Sequence: Synthetic oligonucleotide"
ggaccaccagcagtcaaagtc

SEQ ID NO: 31442 - DNA, 21 bp, Artificial Sequence
  source: /note="Description of Artificial Sequence: Synthetic oligonucleotide"
ggaccaccacacggacacagc

SEQ ID NO: 31443 - DNA, 21 bp, Artificial Sequence
  source: /note="Description of Artificial Sequence: Synthetic oligonucleotide"
ggaccaccaaaagcaaaccca

SEQ ID NO: 31444 - DNA, 21 bp, Artificial Sequence
  source: /note="Description of Artificial Sequence: Synthetic oligonucleotide"
ggaccaccactcctcgcacca

SEQ ID NO: 31445 - DNA, 21 bp, Artificial Sequence
  source: /note="Description of Artificial Sequence: Synthetic oligonucleotide"
ggaccaccaatgagaccaagc

SEQ ID NO: 31446 - DNA, 21 bp, Artificial Sequence
  source: /note="Description of Artificial Sequence: Synthetic oligonucleotide"
ggaccaccaccacaaccaagc

SEQ ID NO: 31447 - DNA, 21 bp, Artificial Sequence
  source: /note="Description of Artificial Sequence: Synthetic oligonucleotide"
ggaccaccaccaacaaactgg

SEQ ID NO: 31448 - DNA, 21 bp, Artificial Sequence
  source: /note="Description of Artificial Sequence: Synthetic oligonucleotide"
ggaccacaaacagtcacagga

SEQ ID NO: 31449 - DNA, 21 bp, Artificial Sequence
  source: /note="Description of Artificial Sequence: Synthetic oligonucleotide"
ggaccaagagacccaagaaac

SEQ ID NO: 31450 - DNA, 21 bp, Artificial Sequence
  source: /note="Description of Artificial Sequence: Synthetic oligonucleotide"
ggaccaagaggattcctcaac

SEQ ID NO: 31451 - DNA, 21 bp, Artificial Sequence
  source: /note="Description of Artificial Sequence: Synthetic oligonucleotide"
ggaccaagaccacaacacctc

SEQ ID NO: 31452 - DNA, 21 bp, Artificial Sequence
  source: /note="Description of Artificial Sequence: Synthetic oligonucleotide"
ggaccaagagtcacaaacgac

SEQ ID NO: 31453 - DNA, 21 bp, Artificial Sequence
  source: /note="Description of Artificial Sequence: Synthetic oligonucleotide"
ggaccaagcgaccacggaagc

SEQ ID NO: 31454 - DNA, 21 bp, Artificial Sequence
  source: /note="Description of Artificial Sequence: Synthetic oligonucleotide"
ggaccaagcaaagcactcgca

SEQ ID NO: 31455 - DNA, 21 bp, Artificial Sequence
  source: /note="Description of Artificial Sequence: Synthetic oligonucleotide"
ggaccaagcctcaacacaaca

SEQ ID NO: 31456 - DNA, 21 bp, Artificial Sequence
  source: /note="Description of Artificial Sequence: Synthetic oligonucleotide"
ggaccaagcccagaaagcagc

SEQ ID NO: 31457 - DNA, 21 bp, Artificial Sequence
  source: /note="Description of Artificial Sequence: Synthetic oligonucleotide"
ggaccaagcagaaacgcacca

SEQ ID NO: 31458 - DNA, 21 bp, Artificial Sequence
  source: /note="Description of Artificial Sequence: Synthetic oligonucleotide"
ggaccaagcagcgcaaaactc

SEQ ID NO: 31459 - DNA, 21 bp, Artificial Sequence
  source: /note="Description of Artificial Sequence: Synthetic oligonucleotide"
ggaccaagcagcagcgcatac

SEQ ID NO: 31460 - DNA, 21 bp, Artificial Sequence
  source: /note="Description of Artificial Sequence: Synthetic oligonucleotide"
ggaccaagcagcgtcccagac

SEQ ID NO: 31461 - DNA, 21 bp, Artificial Sequence
  source: /note="Description of Artificial Sequence: Synthetic oligonucleotide"
ggaccaagcacaagcctcatc

SEQ ID NO: 31462 - DNA, 21 bp, Artificial Sequence
  source: /note="Description of Artificial Sequence: Synthetic oligonucleotide"
ggaccaagcgtccacccagca

SEQ ID NO: 31463 - DNA, 21 bp, Artificial Sequence
  source: /note="Description of Artificial Sequence: Synthetic oligonucleotide"
ggaccaagcgtccacacagac

SEQ ID NO: 31464 - DNA, 21 bp, Artificial Sequence
  source: /note="Description of Artificial Sequence: Synthetic oligonucleotide"
ggaccaagctacatcgacagc

SEQ ID NO: 31465 - DNA, 21 bp, Artificial Sequence
  source: /note="Description of Artificial Sequence: Synthetic oligonucleotide"
ggaccaacagaaacaccactc

SEQ ID NO: 31466 - DNA, 21 bp, Artificial Sequence
  source: /note="Description of Artificial Sequence: Synthetic oligonucleotide"
ggaccaacaggagacctcgtc

SEQ ID NO: 31467 - DNA, 21 bp, Artificial Sequence
  source: /note="Description of Artificial Sequence: Synthetic oligonucleotide"
ggaccaacaggaagcagcgaa

SEQ ID NO: 31468 - DNA, 21 bp, Artificial Sequence
  source: /note="Description of Artificial Sequence: Synthetic oligonucleotide"
ggaccaacacacccaagaatc

SEQ ID NO: 31469 - DNA, 21 bp, Artificial Sequence
  source: /note="Description of Artificial Sequence: Synthetic oligonucleotide"
ggaccaacaatgagcatgaca

SEQ ID NO: 31470 - DNA, 21 bp, Artificial Sequence
  source: /note="Description of Artificial Sequence: Synthetic oligonucleotide"
ggaccaacaagcctcgcaatc

SEQ ID NO: 31471 - DNA, 21 bp, Artificial Sequence
  source: /note="Description of Artificial Sequence: Synthetic oligonucleotide"
ggaccaacatacccacacgca

SEQ ID NO: 31472 - DNA, 21 bp, Artificial Sequence
  source: /note="Description of Artificial Sequence: Synthetic oligonucleotide"
ggaccagtcaaaccaagagac

SEQ ID NO: 31473 - DNA, 21 bp, Artificial Sequence
  source: /note="Description of Artificial Sequence: Synthetic oligonucleotide"
ggaccagtcaacgcaccagac

SEQ ID NO: 31474 - DNA, 21 bp, Artificial Sequence
  source: /note="Description of Artificial Sequence: Synthetic oligonucleotide"
ggaccagtcagcggagtcagc

SEQ ID NO: 31475 - DNA, 21 bp, Artificial Sequence
  source: /note="Description of Artificial Sequence: Synthetic oligonucleotide"
ggaccatacaacgtcgacgtc

SEQ ID NO: 31476 - DNA, 21 bp, Artificial Sequence
  source: /note="Description of Artificial Sequence: Synthetic oligonucleotide"
ggaccatacagcgcaccagga

SEQ ID NO: 31477 - DNA, 21 bp, Artificial Sequence
  source: /note="Description of Artificial Sequence: Synthetic oligonucleotide"
ggacaagcaatcggacaccca

SEQ ID NO: 31478 - DNA, 21 bp, Artificial Sequence
  source: /note="Description of Artificial Sequence: Synthetic oligonucleotide"
ggacaagcaagaaacgaaaca

SEQ ID NO: 31479 - DNA, 21 bp, Artificial Sequence
  source: /note="Description of Artificial Sequence: Synthetic oligonucleotide"
ggacaagcaagcgcaccattc

SEQ ID NO: 31480 - DNA, 21 bp, Artificial Sequence
  source: /note="Description of Artificial Sequence: Synthetic oligonucleotide"
ggacaagcaagcatcagcagc

SEQ ID NO: 31481 - DNA, 21 bp, Artificial Sequence
  source: /note="Description of Artificial Sequence: Synthetic oligonucleotide"
ggacaagcaagcagacaaagc

SEQ ID NO: 31482 - DNA, 21 bp, Artificial Sequence
  source: /note="Description of Artificial Sequence: Synthetic oligonucleotide"
ggacaagcagtcaaagtcaac

SEQ ID NO: 31483 - DNA, 21 bp, Artificial Sequence
  source: /note="Description of Artificial Sequence: Synthetic oligonucleotide"
ggacaagacgacgtcaacatc

SEQ ID NO: 31484 - DNA, 21 bp, Artificial Sequence
  source: /note="Description of Artificial Sequence: Synthetic oligonucleotide"
ggacaagacatgcacgacagc

SEQ ID NO: 31485 - DNA, 21 bp, Artificial Sequence
  source: /note="Description of Artificial Sequence: Synthetic oligonucleotide"
ggacaagaatggcaagcagga

SEQ ID NO: 31486 - DNA, 21 bp, Artificial Sequence
  source: /note="Description of Artificial Sequence: Synthetic oligonucleotide"
ggacaattcgtcgtcagacaa

SEQ ID NO: 31487 - DNA, 21 bp, Artificial Sequence
  source: /note="Description of Artificial Sequence: Synthetic oligonucleotide"
ggacaaggacacccaccaaac

SEQ ID NO: 31488 - DNA, 21 bp, Artificial Sequence
  source: /note="Description of Artificial Sequence: Synthetic oligonucleotide"
ggacaaggaagcacaccactc

SEQ ID NO: 31489 - DNA, 21 bp, Artificial Sequence
  source: /note="Description of Artificial Sequence: Synthetic oligonucleotide"
ggacaacacgcaagactccaa

SEQ ID NO: 31490 - DNA, 21 bp, Artificial Sequence
  source: /note="Description of Artificial Sequence: Synthetic oligonucleotide"
ggacaacacggaaaaccagca

SEQ ID NO: 31491 - DNA, 21 bp, Artificial Sequence
  source: /note="Description of Artificial Sequence: Synthetic oligonucleotide"
ggacaacacctcagcccaaac

SEQ ID NO: 31492 - DNA, 21 bp, Artificial Sequence
  source: /note="Description of Artificial Sequence: Synthetic oligonucleotide"
ggacaaatcgtcgcaccaaca

SEQ ID NO: 31493 - DNA, 21 bp, Artificial Sequence
  source: /note="Description of Artificial Sequence: Synthetic oligonucleotide"
ggacaaatcgtcacaagcgga

SEQ ID NO: 31494 - DNA, 21 bp, Artificial Sequence
  source: /note="Description of Artificial Sequence: Synthetic oligonucleotide"
ggacaactcgacatgacaaca

SEQ ID NO: 31495 - DNA, 21 bp, Artificial Sequence
  source: /note="Description of Artificial Sequence: Synthetic oligonucleotide"
ggacaactcaacctcagacca

SEQ ID NO: 31496 - DNA, 21 bp, Artificial Sequence
  source: /note="Description of Artificial Sequence: Synthetic oligonucleotide"
ggacaactccaaagcggaagc

SEQ ID NO: 31497 - DNA, 21 bp, Artificial Sequence
  source: /note="Description of Artificial Sequence: Synthetic oligonucleotide"
ggacaaatggcaagaccagac

SEQ ID NO: 31498 - DNA, 21 bp, Artificial Sequence
  source: /note="Description of Artificial Sequence: Synthetic oligonucleotide"
ggacaaatgatcagcgcacaa

SEQ ID NO: 31499 - DNA, 21 bp, Artificial Sequence
  source: /note="Description of Artificial Sequence: Synthetic oligonucleotide"
ggacaaccaagcccatggcca

SEQ ID NO: 31500 - DNA, 21 bp, Artificial Sequence
  source: /note="Description of Artificial Sequence: Synthetic oligonucleotide"
ggacaacaagacaacagagac

SEQ ID NO: 31501 - DNA, 21 bp, Artificial Sequence
  source: /note="Description of Artificial Sequence: Synthetic oligonucleotide"
ggacaacaacaaggattcatc

SEQ ID NO: 31502 - DNA, 21 bp, Artificial Sequence
  source: /note="Description of Artificial Sequence: Synthetic oligonucleotide"
ggacaaagaaaactcgaagga

SEQ ID NO: 31503 - DNA, 21 bp, Artificial Sequence
  source: /note="Description of Artificial Sequence: Synthetic oligonucleotide"
ggacaaagaatgagcatgaca

SEQ ID NO: 31504 - DNA, 21 bp, Artificial Sequence
  source: /note="Description of Artificial Sequence: Synthetic oligonucleotide"
ggacaaagaacaacatacgtc

SEQ ID NO: 31505 - DNA, 21 bp, Artificial Sequence
  source: /note="Description of Artificial Sequence: Synthetic oligonucleotide"
ggacaaagcttcgaaagaaca

SEQ ID NO: 31506 - DNA, 21 bp, Artificial Sequence
  source: /note="Description of Artificial Sequence: Synthetic oligonucleotide"
ggacaaagcctcgcaatcaga

SEQ ID NO: 31507 - DNA, 21 bp, Artificial Sequence
  source: /note="Description of Artificial Sequence: Synthetic oligonucleotide"
ggacaaagcctcacacaccca

SEQ ID NO: 31508 - DNA, 21 bp, Artificial Sequence
  source: /note="Description of Artificial Sequence: Synthetic oligonucleotide"
ggacaaagcacaagacaagac

SEQ ID NO: 31509 - DNA, 21 bp, Artificial Sequence
  source: /note="Description of Artificial Sequence: Synthetic oligonucleotide"
ggacaaacatgcacaagcctc

SEQ ID NO: 31510 - DNA, 21 bp, Artificial Sequence
  source: /note="Description of Artificial Sequence: Synthetic oligonucleotide"
ggacaaacactcgcactcgac

SEQ ID NO: 31511 - DNA, 21 bp, Artificial Sequence
  source: /note="Description of Artificial Sequence: Synthetic oligonucleotide"
ggacaaacatacccaacactc

SEQ ID NO: 31512 - DNA, 21 bp, Artificial Sequence
  source: /note="Description of Artificial Sequence: Synthetic oligonucleotide"
ggacaagtccacctcaaccca

SEQ ID NO: 31513 - DNA, 21 bp, Artificial Sequence
  source: /note="Description of Artificial Sequence: Synthetic oligonucleotide"
ggacaatacggaagacaacca

SEQ ID NO: 31514 - DNA, 21 bp, Artificial Sequence
  source: /note="Description of Artificial Sequence: Synthetic oligonucleotide"
ggacaataccacagagacaca

SEQ ID NO: 31515 - DNA, 21 bp, Artificial Sequence
  source: /note="Description of Artificial Sequence: Synthetic oligonucleotide"
ggacaatacagcgcaagcaca

SEQ ID NO: 31516 - DNA, 21 bp, Artificial Sequence
  source: /note="Description of Artificial Sequence: Synthetic oligonucleotide"
ggaagagcagcaccaatcagc

SEQ ID NO: 31517 - DNA, 21 bp, Artificial Sequence
  source: /note="Description of Artificial Sequence: Synthetic oligonucleotide"
ggaagagcaaacacaggattc

SEQ ID NO: 31518 - DNA, 21 bp, Artificial Sequence
  source: /note="Description of Artificial Sequence: Synthetic oligonucleotide"
ggaagagcaagaccactccca

SEQ ID NO: 31519 - DNA, 21 bp, Artificial Sequence
  source: /note="Description of Artificial Sequence: Synthetic oligonucleotide"
ggaagagcaagcacatacgtc

SEQ ID NO: 31520 - DNA, 21 bp, Artificial Sequence
  source: /note="Description of Artificial Sequence: Synthetic oligonucleotide"
ggaagagacgaagtcccactc

SEQ ID NO: 31521 - DNA, 21 bp, Artificial Sequence
  source: /note="Description of Artificial Sequence: Synthetic oligonucleotide"
ggaagagacggaatgccaagc

SEQ ID NO: 31522 - DNA, 21 bp, Artificial Sequence
  source: /note="Description of Artificial Sequence: Synthetic oligonucleotide"
ggaagagacccaacaccagtc

SEQ ID NO: 31523 - DNA, 21 bp, Artificial Sequence
  source: /note="Description of Artificial Sequence: Synthetic oligonucleotide"
ggaagagacccagtcagacac

SEQ ID NO: 31524 - DNA, 21 bp, Artificial Sequence
  source: /note="Description of Artificial Sequence: Synthetic oligonucleotide"
ggaagagaacacatgcacaca

SEQ ID NO: 31525 - DNA, 21 bp, Artificial Sequence
  source: /note="Description of Artificial Sequence: Synthetic oligonucleotide"
ggaagagaactcctccacagc

SEQ ID NO: 31526 - DNA, 21 bp, Artificial Sequence
  source: /note="Description of Artificial Sequence: Synthetic oligonucleotide"
ggaagagaaagccaaatccca

SEQ ID NO: 31527 - DNA, 21 bp, Artificial Sequence
  source: /note="Description of Artificial Sequence: Synthetic oligonucleotide"
ggaagagaaagcgtcacaagc

SEQ ID NO: 31528 - DNA, 21 bp, Artificial Sequence
  source: /note="Description of Artificial Sequence: Synthetic oligonucleotide"
ggaagagaatacgtcggaaac

SEQ ID NO: 31529 - DNA, 21 bp, Artificial Sequence
  source: /note="Description of Artificial Sequence: Synthetic oligonucleotide"
ggaagattcggaacaagcgac

SEQ ID NO: 31530 - DNA, 21 bp, Artificial Sequence
  source: /note="Description of Artificial Sequence: Synthetic oligonucleotide"
ggaagaggagcacaaccagga

SEQ ID NO: 31531 - DNA, 21 bp, Artificial Sequence
  source: /note="Description of Artificial Sequence: Synthetic oligonucleotide"
ggaagaggagacaacccagca

SEQ ID NO: 31532 - DNA, 21 bp, Artificial Sequence
  source: /note="Description of Artificial Sequence: Synthetic oligonucleotide"
ggaagaggagaagcaggactc

SEQ ID NO: 31533 - DNA, 21 bp, Artificial Sequence
  source: /note="Description of Artificial Sequence: Synthetic oligonucleotide"
ggaagaggaggagaaagcgtc

SEQ ID NO: 31534 - DNA, 21 bp, Artificial Sequence
  source: /note="Description of Artificial Sequence: Synthetic oligonucleotide"
ggaagaggactcccaatgagc

SEQ ID NO: 31535 - DNA, 21 bp, Artificial Sequence
  source: /note="Description of Artificial Sequence: Synthetic oligonucleotide"
ggaagaggaccaccaccacca

SEQ ID NO: 31536 - DNA, 21 bp, Artificial Sequence
  source: /note="Description of Artificial Sequence: Synthetic oligonucleotide"
ggaagaggacaaagcgcaagc

SEQ ID NO: 31537 - DNA, 21 bp, Artificial Sequence
  source: /note="Description of Artificial Sequence: Synthetic oligonucleotide"
ggaagaggaacaccaccagac

SEQ ID NO: 31538 - DNA, 21 bp, Artificial Sequence
  source: /note="Description of Artificial Sequence: Synthetic oligonucleotide"
ggaagaatcgcaccagtccca

SEQ ID NO: 31539 - DNA, 21 bp, Artificial Sequence
  source: /note="Description of Artificial Sequence: Synthetic oligonucleotide"
ggaagaatctacacagcagaa

SEQ ID NO: 31540 - DNA, 21 bp, Artificial Sequence
  source: /note="Description of Artificial Sequence: Synthetic oligonucleotide"
ggaagactcctcccagaagtc

SEQ ID NO: 31541 - DNA, 21 bp, Artificial Sequence
  source: /note="Description of Artificial Sequence: Synthetic oligonucleotide"
ggaagactcccagcaagcctc

SEQ ID NO: 31542 - DNA, 21 bp, Artificial Sequence
  source: /note="Description of Artificial Sequence: Synthetic oligonucleotide"
ggaagaatggaaggaggagga

SEQ ID NO: 31543 - DNA, 21 bp, Artificial Sequence
  source: /note="Description of Artificial Sequence: Synthetic oligonucleotide"
ggaagaatggaaaacacagtc

SEQ ID NO: 31544 - DNA, 21 bp, Artificial Sequence
  source: /note="Description of Artificial Sequence: Synthetic oligonucleotide"
ggaagaatgatgaacagcagc

SEQ ID NO: 31545 - DNA, 21 bp, Artificial Sequence
  source: /note="Description of Artificial Sequence: Synthetic oligonucleotide"
ggaagaatggtcacaggagaa

SEQ ID NO: 31546 - DNA, 21 bp, Artificial Sequence
  source: /note="Description of Artificial Sequence: Synthetic oligonucleotide"
ggaagaaacgacgcatacgca

SEQ ID NO: 31547 - DNA, 21 bp, Artificial Sequence
  source: /note="Description of Artificial Sequence: Synthetic oligonucleotide"
ggaagaaacgaaccatggagc

SEQ ID NO: 31548 - DNA, 21 bp, Artificial Sequence
  source: /note="Description of Artificial Sequence: Synthetic oligonucleotide"
ggaagaaacccaccactctac

SEQ ID NO: 31549 - DNA, 21 bp, Artificial Sequence
  source: /note="Description of Artificial Sequence: Synthetic oligonucleotide"
ggaagaaacccaccaagcgca

SEQ ID NO: 31550 - DNA, 21 bp, Artificial Sequence
  source: /note="Description of Artificial Sequence: Synthetic oligonucleotide"
ggaagaaacagcaactacgac

SEQ ID NO: 31551 - DNA, 21 bp, Artificial Sequence
  source: /note="Description of Artificial Sequence: Synthetic oligonucleotide"
ggaagaaacgtcgcaggactc

SEQ ID NO: 31552 - DNA, 21 bp, Artificial Sequence
  source: /note="Description of Artificial Sequence: Synthetic oligonucleotide"
ggaagaccagacacagaacac

SEQ ID NO: 31553 - DNA, 21 bp, Artificial Sequence
  source: /note="Description of Artificial Sequence: Synthetic oligonucleotide"
ggaagaccactcccaacaagc

SEQ ID NO: 31554 - DNA, 21 bp, Artificial Sequence
  source: /note="Description of Artificial Sequence: Synthetic oligonucleotide"
ggaagaccactccaagcacca

SEQ ID NO: 31555 - DNA, 21 bp, Artificial Sequence
  source: /note="Description of Artificial Sequence: Synthetic oligonucleotide"
ggaagaccaccactcctccca

SEQ ID NO: 31556 - DNA, 21 bp, Artificial Sequence
  source: /note="Description of Artificial Sequence: Synthetic oligonucleotide"
ggaagaccaccaagcatgagc

SEQ ID NO: 31557 - DNA, 21 bp, Artificial Sequence
  source: /note="Description of Artificial Sequence: Synthetic oligonucleotide"
ggaagaccaccaacagacaaa

SEQ ID NO: 31558 - DNA, 21 bp, Artificial Sequence
  source: /note="Description of Artificial Sequence: Synthetic oligonucleotide"
ggaagacaagaccacccagga

SEQ ID NO: 31559 - DNA, 21 bp, Artificial Sequence
  source: /note="Description of Artificial Sequence: Synthetic oligonucleotide"
ggaagacaactcgcatgcaac

SEQ ID NO: 31560 - DNA, 21 bp, Artificial Sequence
  source: /note="Description of Artificial Sequence: Synthetic oligonucleotide"
ggaagacaaatgggaatcaca

SEQ ID NO: 31561 - DNA, 21 bp, Artificial Sequence
  source: /note="Description of Artificial Sequence: Synthetic oligonucleotide"
ggaagacaaccaagcggagaa

SEQ ID NO: 31562 - DNA, 21 bp, Artificial Sequence
  source: /note="Description of Artificial Sequence: Synthetic oligonucleotide"
ggaagacaaagcgtcagcaac

SEQ ID NO: 31563 - DNA, 21 bp, Artificial Sequence
  source: /note="Description of Artificial Sequence: Synthetic oligonucleotide"
ggaagacaagtcgacttcgtc

SEQ ID NO: 31564 - DNA, 21 bp, Artificial Sequence
  source: /note="Description of Artificial Sequence: Synthetic oligonucleotide"
ggaagaagcgacctcagcaac

SEQ ID NO: 31565 - DNA, 21 bp, Artificial Sequence
  source: /note="Description of Artificial Sequence: Synthetic oligonucleotide"
ggaagaagcgaatacaaccaa

SEQ ID NO: 31566 - DNA, 21 bp, Artificial Sequence
  source: /note="Description of Artificial Sequence: Synthetic oligonucleotide"
ggaagaagcatcatgagcgaa

SEQ ID NO: 31567 - DNA, 21 bp, Artificial Sequence
  source: /note="Description of Artificial Sequence: Synthetic oligonucleotide"
ggaagaagcctcctcagagaa

SEQ ID NO: 31568 - DNA, 21 bp, Artificial Sequence
  source: /note="Description of Artificial Sequence: Synthetic oligonucleotide"
ggaagaagcccaatccaaagc

SEQ ID NO: 31569 - DNA, 21 bp, Artificial Sequence
  source: /note="Description of Artificial Sequence: Synthetic oligonucleotide"
ggaagaagcagcgtcgcaaca

SEQ ID NO: 31570 - DNA, 21 bp, Artificial Sequence
  source: /note="Description of Artificial Sequence: Synthetic oligonucleotide"
ggaagaagcgtccaacacctc

SEQ ID NO: 31571 - DNA, 21 bp, Artificial Sequence
  source: /note="Description of Artificial Sequence: Synthetic oligonucleotide"
ggaagaacaggaagcccagga

SEQ ID NO: 31572 - DNA, 21 bp, Artificial Sequence
  source: /note="Description of Artificial Sequence: Synthetic oligonucleotide"
ggaagaacaagcggaagcagc

SEQ ID NO: 31573 - DNA, 21 bp, Artificial Sequence
  source: /note="Description of Artificial Sequence: Synthetic oligonucleotide"
ggaagaacaagcatggcaaca

SEQ ID NO: 31574 - DNA, 21 bp, Artificial Sequence
  source: /note="Description of Artificial Sequence: Synthetic oligonucleotide"
ggaagaacaagcagagcagaa

SEQ ID NO: 31575 - DNA, 21 bp, Artificial Sequence
  source: /note="Description of Artificial Sequence: Synthetic oligonucleotide"
ggaagaacataccaaatccca

SEQ ID NO: 31576 - DNA, 21 bp, Artificial Sequence
  source: /note="Description of Artificial Sequence: Synthetic oligonucleotide"
ggaagagtcctcctcctcgac

SEQ ID NO: 31577 - DNA, 21 bp, Artificial Sequence
  source: /note="Description of Artificial Sequence: Synthetic oligonucleotide"
ggaagagtccaagtcccacca

SEQ ID NO: 31578 - DNA, 21 bp, Artificial Sequence
  source: /note="Description of Artificial Sequence: Synthetic oligonucleotide"
ggaagagtcgtctacatcgac

SEQ ID NO: 31579 - DNA, 21 bp, Artificial Sequence
  source: /note="Description of Artificial Sequence: Synthetic oligonucleotide"
ggaagatacatggcaccactc

SEQ ID NO: 31580 - DNA, 21 bp, Artificial Sequence
  source: /note="Description of Artificial Sequence: Synthetic oligonucleotide"
ggaagatacagagcaggacaa

SEQ ID NO: 31581 - DNA, 21 bp, Artificial Sequence
  source: /note="Description of Artificial Sequence: Synthetic oligonucleotide"
ggaagcgcaatcagcgaactc

SEQ ID NO: 31582 - DNA, 21 bp, Artificial Sequence
  source: /note="Description of Artificial Sequence: Synthetic oligonucleotide"
ggaagcgcactcccaacaaga

SEQ ID NO: 31583 - DNA, 21 bp, Artificial Sequence
  source: /note="Description of Artificial Sequence: Synthetic oligonucleotide"
ggaagcgcaccagtcgtcctc

SEQ ID NO: 31584 - DNA, 21 bp, Artificial Sequence
  source: /note="Description of Artificial Sequence: Synthetic oligonucleotide"
ggaagcgcacaaggagcaaga

SEQ ID NO: 31585 - DNA, 21 bp, Artificial Sequence
  source: /note="Description of Artificial Sequence: Synthetic oligonucleotide"
ggaagcgcaagaacacaccca

SEQ ID NO: 31586 - DNA, 21 bp, Artificial Sequence
  source: /note="Description of Artificial Sequence: Synthetic oligonucleotide"
ggaagcgcaagcccaatgatg

SEQ ID NO: 31587 - DNA, 21 bp, Artificial Sequence
  source: /note="Description of Artificial Sequence: Synthetic oligonucleotide"
ggaagcgcaagcagcggattc

SEQ ID NO: 31588 - DNA, 21 bp, Artificial Sequence
  source: /note="Description of Artificial Sequence: Synthetic oligonucleotide"
ggaagcgacggattcagcaac

SEQ ID NO: 31589 - DNA, 21 bp, Artificial Sequence
  source: /note="Description of Artificial Sequence: Synthetic oligonucleotide"
ggaagcgacggacaaaaagga

SEQ ID NO: 31590 - DNA, 21 bp, Artificial Sequence
  source: /note="Description of Artificial Sequence: Synthetic oligonucleotide"
ggaagcgacagaatcgtcagc

SEQ ID NO: 31591 - DNA, 21 bp, Artificial Sequence
  source: /note="Description of Artificial Sequence: Synthetic oligonucleotide"
ggaagcgacacaccaagccca

SEQ ID NO: 31592 - DNA, 21 bp, Artificial Sequence
  source: /note="Description of Artificial Sequence: Synthetic oligonucleotide"
ggaagcgacacaacagaaatc

SEQ ID NO: 31593 - DNA, 21 bp, Artificial Sequence
  source: /note="Description of Artificial Sequence: Synthetic oligonucleotide"
ggaagcgacgtcatccacgaa

SEQ ID NO: 31594 - DNA, 21 bp, Artificial Sequence
  source: /note="Description of Artificial Sequence: Synthetic oligonucleotide"
ggaagcgaagtcgtcgcatgc

SEQ ID NO: 31595 - DNA, 21 bp, Artificial Sequence
  source: /note="Description of Artificial Sequence: Synthetic oligonucleotide"
ggaagcttcacaagccaaatc

SEQ ID NO: 31596 - DNA, 21 bp, Artificial Sequence
  source: /note="Description of Artificial Sequence: Synthetic oligonucleotide"
ggaagcggactcatcagagga

SEQ ID NO: 31597 - DNA, 21 bp, Artificial Sequence
  source: /note="Description of Artificial Sequence: Synthetic oligonucleotide"
ggaagcggaaacgacgtcctc

SEQ ID NO: 31598 - DNA, 21 bp, Artificial Sequence
  source: /note="Description of Artificial Sequence: Synthetic oligonucleotide"
ggaagcggaccaaacaaaagc

SEQ ID NO: 31599 - DNA, 21 bp, Artificial Sequence
  source: /note="Description of Artificial Sequence: Synthetic oligonucleotide"
ggaagcggaccaacaatcaga

SEQ ID NO: 31600 - DNA, 21 bp, Artificial Sequence
  source: /note="Description of Artificial Sequence: Synthetic oligonucleotide"
ggaagcggaccagtcgaacac

SEQ ID NO: 31601 - DNA, 21 bp, Artificial Sequence
  source: /note="Description of Artificial Sequence: Synthetic oligonucleotide"
ggaagcggaagcagccaaaca

SEQ ID NO: 31602 - DNA, 21 bp, Artificial Sequence
  source: /note="Description of Artificial Sequence: Synthetic oligonucleotide"
ggaagcggaagcacaagcgga

SEQ ID NO: 31603 - DNA, 21 bp, Artificial Sequence
  source: /note="Description of Artificial Sequence: Synthetic oligonucleotide"
ggaagcggaacatacacagtc

SEQ ID NO: 31604 - DNA, 21 bp, Artificial Sequence
  source: /note="Description of Artificial Sequence: Synthetic oligonucleotide"
ggaagccacgcagtcacaagc

SEQ ID NO: 31605 - DNA, 21 bp, Artificial Sequence
  source: /note="Description of Artificial Sequence: Synthetic oligonucleotide"
ggaagccaccacagcccacac

SEQ ID NO: 31606 - DNA, 21 bp, Artificial Sequence
  source: /note="Description of Artificial Sequence: Synthetic oligonucleotide"
ggaagccacatcacaccactc

SEQ ID NO: 31607 - DNA, 21 bp, Artificial Sequence
  source: /note="Description of Artificial Sequence: Synthetic oligonucleotide"
ggaagccacccaatcgtcaga

SEQ ID NO: 31608 - DNA, 21 bp, Artificial Sequence
  source: /note="Description of Artificial Sequence: Synthetic oligonucleotide"
ggaagccacccaagaggagaa

SEQ ID NO: 31609 - DNA, 21 bp, Artificial Sequence
  source: /note="Description of Artificial Sequence: Synthetic oligonucleotide"
ggaagccaccaaggacaaagc

SEQ ID NO: 31610 - DNA, 21 bp, Artificial Sequence
  source: /note="Description of Artificial Sequence: Synthetic oligonucleotide"
ggaagccacagcggaggacca

SEQ ID NO: 31611 - DNA, 21 bp, Artificial Sequence
  source: /note="Description of Artificial Sequence: Synthetic oligonucleotide"
ggaagccacagcccagcaatg

SEQ ID NO: 31612 - DNA, 21 bp, Artificial Sequence
  source: /note="Description of Artificial Sequence: Synthetic oligonucleotide"
ggaagccacacatggacagaa

SEQ ID NO: 31613 - DNA, 21 bp, Artificial Sequence
  source: /note="Description of Artificial Sequence: Synthetic oligonucleotide"
ggaagcatcggagaacaagtc

SEQ ID NO: 31614 - DNA, 21 bp, Artificial Sequence
  source: /note="Description of Artificial Sequence: Synthetic oligonucleotide"
ggaagcatccaagtcacagca

SEQ ID NO: 31615 - DNA, 21 bp, Artificial Sequence
  source: /note="Description of Artificial Sequence: Synthetic oligonucleotide"
ggaagcatcgtcctccacgaa

SEQ ID NO: 31616 - DNA, 21 bp, Artificial Sequence
  source: /note="Description of Artificial Sequence: Synthetic oligonucleotide"
ggaagcaaaaaccaagaaaaa

SEQ ID NO: 31617 - DNA, 21 bp, Artificial Sequence
  source: /note="Description of Artificial Sequence: Synthetic oligonucleotide"
ggaagcaaaccattcctcagc

SEQ ID NO: 31618 - DNA, 21 bp, Artificial Sequence
  source: /note="Description of Artificial Sequence: Synthetic oligonucleotide"
ggaagcaaaagacaagaccaa

SEQ ID NO: 31619 - DNA, 21 bp, Artificial Sequence
  source: /note="Description of Artificial Sequence: Synthetic oligonucleotide"
ggaagcaaaagcttcggaagc

SEQ ID NO: 31620 - DNA, 21 bp, Artificial Sequence
  source: /note="Description of Artificial Sequence: Synthetic oligonucleotide"
ggaagcaaaacattcctcagc

SEQ ID NO: 31621 - DNA, 21 bp, Artificial Sequence
  source: /note="Description of Artificial Sequence: Synthetic oligonucleotide"
ggaagcaaagtcgcaggactc

SEQ ID NO: 31622 - DNA, 21 bp, Artificial Sequence
  source: /note="Description of Artificial Sequence: Synthetic oligonucleotide"
ggaagcaaagtcggaccactc

SEQ ID NO: 31623 - DNA, 21 bp, Artificial Sequence
  source: /note="Description of Artificial Sequence: Synthetic oligonucleotide"
ggaagcctcgaacaaagatac

SEQ ID NO: 31624 - DNA, 21 bp, Artificial Sequence
  source: /note="Description of Artificial Sequence: Synthetic oligonucleotide"
ggaagcctcggacacatgaga

SEQ ID NO: 31625 - DNA, 21 bp, Artificial Sequence
  source: /note="Description of Artificial Sequence: Synthetic oligonucleotide"
ggaagcctcggaacacacagc

SEQ ID NO: 31626 - DNA, 21 bp, Artificial Sequence
  source: /note="Description of Artificial Sequence: Synthetic oligonucleotide"
ggaagcctcatcgcagcacaa

SEQ ID NO: 31627 - DNA, 21 bp, Artificial Sequence
  source: /note="Description of Artificial Sequence: Synthetic oligonucleotide"
ggaagcctcaacccagtccca

SEQ ID NO: 31628 - DNA, 21 bp, Artificial Sequence
  source: /note="Description of Artificial Sequence: Synthetic oligonucleotide"
ggaagcctcccatacagcagc

SEQ ID NO: 31629 - DNA, 21 bp, Artificial Sequence
  source: /note="Description of Artificial Sequence: Synthetic oligonucleotide"
ggaagcctctacagaacagaa

SEQ ID NO: 31630 - DNA, 21 bp, Artificial Sequence
  source: /note="Description of Artificial Sequence: Synthetic oligonucleotide"
ggaagcatggcatacctcgga

SEQ ID NO: 31631 - DNA, 21 bp, Artificial Sequence
  source: /note="Description of Artificial Sequence: Synthetic oligonucleotide"
ggaagcatgctcgcacaccca

SEQ ID NO: 31632 - DNA, 21 bp, Artificial Sequence
  source: /note="Description of Artificial Sequence: Synthetic oligonucleotide"
ggaagcatgaacccaccaagc

SEQ ID NO: 31633 - DNA, 21 bp, Artificial Sequence
  source: /note="Description of Artificial Sequence: Synthetic oligonucleotide"
ggaagcatgccagtcatcgtc

SEQ ID NO: 31634 - DNA, 21 bp, Artificial Sequence
  source: /note="Description of Artificial Sequence: Synthetic oligonucleotide"
ggaagcatgagaccaggagaa

SEQ ID NO: 31635 - DNA, 21 bp, Artificial Sequence
  source: /note="Description of Artificial Sequence: Synthetic oligonucleotide"
ggaagcatgagcagcgcaaac

SEQ ID NO: 31636 - DNA, 21 bp, Artificial Sequence
  source: /note="Description of Artificial Sequence: Synthetic oligonucleotide"
ggaagcatgacaagcctcatc

SEQ ID NO: 31637 - DNA, 21 bp, Artificial Sequence
  source: /note="Description of Artificial Sequence: Synthetic oligonucleotide"
ggaagcatgtacgcagtccca

SEQ ID NO: 31638 - DNA, 21 bp, Artificial Sequence
  source: /note="Description of Artificial Sequence: Synthetic oligonucleotide"
ggaagcaacggaggaatcagc

SEQ ID NO: 31639 - DNA, 21 bp, Artificial Sequence
  source: /note="Description of Artificial Sequence: Synthetic oligonucleotide"
ggaagcaacccaatgagcctc

SEQ ID NO: 31640 - DNA, 21 bp, Artificial Sequence
  source: /note="Description of Artificial Sequence: Synthetic oligonucleotide"
ggaagcccagcaatggcacac

SEQ ID NO: 31641 - DNA, 21 bp, Artificial Sequence
  source: /note="Description of Artificial Sequence: Synthetic oligonucleotide"
ggaagcccaggaagagtcgca

SEQ ID NO: 31642 - DNA, 21 bp, Artificial Sequence
  source: /note="Description of Artificial Sequence: Synthetic oligonucleotide"
ggaagcccaatcggaggaatg

SEQ ID NO: 31643 - DNA, 21 bp, Artificial Sequence
  source: /note="Description of Artificial Sequence: Synthetic oligonucleotide"
ggaagcccaaaaccacacgtc

SEQ ID NO: 31644 - DNA, 21 bp, Artificial Sequence
  source: /note="Description of Artificial Sequence: Synthetic oligonucleotide"
ggaagcccaatgggatacaca

SEQ ID NO: 31645 - DNA, 21 bp, Artificial Sequence
  source: /note="Description of Artificial Sequence: Synthetic oligonucleotide"
ggaagcccaatgccaatcatc

SEQ ID NO: 31646 - DNA, 21 bp, Artificial Sequence
  source: /note="Description of Artificial Sequence: Synthetic oligonucleotide"
ggaagcccaaacagctgcatg

SEQ ID NO: 31647 - DNA, 21 bp, Artificial Sequence
  source: /note="Description of Artificial Sequence: Synthetic oligonucleotide"
ggaagcccaccaacactcaga

SEQ ID NO: 31648 - DNA, 21 bp, Artificial Sequence
  source: /note="Description of Artificial Sequence: Synthetic oligonucleotide"
ggaagcccaagaagcctcagc

SEQ ID NO: 31649 - DNA, 21 bp, Artificial Sequence
  source: /note="Description of Artificial Sequence: Synthetic oligonucleotide"
ggaagcccaagagtcggaaca

SEQ ID NO: 31650 - DNA, 21 bp, Artificial Sequence
  source: /note="Description of Artificial Sequence: Synthetic oligonucleotide"
ggaagcccaagcccaatgaga

SEQ ID NO: 31651 - DNA, 21 bp, Artificial Sequence
  source: /note="Description of Artificial Sequence: Synthetic oligonucleotide"
ggaagcccaacaacaggaagc

SEQ ID NO: 31652 - DNA, 21 bp, Artificial Sequence
  source: /note="Description of Artificial Sequence: Synthetic oligonucleotide"
ggaagcccatacagccaagca

SEQ ID NO: 31653 - DNA, 21 bp, Artificial Sequence
  source: /note="Description of Artificial Sequence: Synthetic oligonucleotide"
ggaagccaactccacccagtc

SEQ ID NO: 31654 - DNA, 21 bp, Artificial Sequence
  source: /note="Description of Artificial Sequence: Synthetic oligonucleotide"
ggaagccaaccaatcagaaca

SEQ ID NO: 31655 - DNA, 21 bp, Artificial Sequence
  source: /note="Description of Artificial Sequence: Synthetic oligonucleotide"
ggaagccaacaactcgcagca

SEQ ID NO: 31656 - DNA, 21 bp, Artificial Sequence
  source: /note="Description of Artificial Sequence: Synthetic oligonucleotide"
ggaagcagagcaagcgaccca

SEQ ID NO: 31657 - DNA, 21 bp, Artificial Sequence
  source: /note="Description of Artificial Sequence: Synthetic oligonucleotide"
ggaagcagactccaacacgac

SEQ ID NO: 31658 - DNA, 21 bp, Artificial Sequence
  source: /note="Description of Artificial Sequence: Synthetic oligonucleotide"
ggaagcagaaacttcccaaca

SEQ ID NO: 31659 - DNA, 21 bp, Artificial Sequence
  source: /note="Description of Artificial Sequence: Synthetic oligonucleotide"
ggaagcagaaactacatcgca

SEQ ID NO: 31660 - DNA, 21 bp, Artificial Sequence
  source: /note="Description of Artificial Sequence: Synthetic oligonucleotide"
ggaagcagaccaggaagcctc

SEQ ID NO: 31661 - DNA, 21 bp, Artificial Sequence
  source: /note="Description of Artificial Sequence: Synthetic oligonucleotide"
ggaagcagacaaccagcagac

SEQ ID NO: 31662 - DNA, 21 bp, Artificial Sequence
  source: /note="Description of Artificial Sequence: Synthetic oligonucleotide"
ggaagcagaacattcacagga

SEQ ID NO: 31663 - DNA, 21 bp, Artificial Sequence
  source: /note="Description of Artificial Sequence: Synthetic oligonucleotide"
ggaagcagaacaggaccaaca

SEQ ID NO: 31664 - DNA, 21 bp, Artificial Sequence
  source: /note="Description of Artificial Sequence: Synthetic oligonucleotide"
ggaagcagagtcagcggagaa

SEQ ID NO: 31665 - DNA, 21 bp, Artificial Sequence
  source: /note="Description of Artificial Sequence: Synthetic oligonucleotide"
ggaagcagcgcaacagtcttc

SEQ ID NO: 31666 - DNA, 21 bp, Artificial Sequence
  source: /note="Description of Artificial Sequence: Synthetic oligonucleotide"
ggaagcagcgacacatgcgtc

SEQ ID NO: 31667 - DNA, 21 bp, Artificial Sequence
  source: /note="Description of Artificial Sequence: Synthetic oligonucleotide"
ggaagcagcggaatcgcaaga

SEQ ID NO: 31668 - DNA, 21 bp, Artificial Sequence
  source: /note="Description of Artificial Sequence: Synthetic oligonucleotide"
ggaagcagccacggaatcctc

SEQ ID NO: 31669 - DNA, 21 bp, Artificial Sequence
  source: /note="Description of Artificial Sequence: Synthetic oligonucleotide"
ggaagcagcatgccaccacca

SEQ ID NO: 31670 - DNA, 21 bp, Artificial Sequence
  source: /note="Description of Artificial Sequence: Synthetic oligonucleotide"
ggaagcagcccagcaagaaca

SEQ ID NO: 31671 - DNA, 21 bp, Artificial Sequence
  source: /note="Description of Artificial Sequence: Synthetic oligonucleotide"
ggaagcagcccactccacaaa

SEQ ID NO: 31672 - DNA, 21 bp, Artificial Sequence
  source: /note="Description of Artificial Sequence: Synthetic oligonucleotide"
ggaagcagcccagtcggagca

SEQ ID NO: 31673 - DNA, 21 bp, Artificial Sequence
  source: /note="Description of Artificial Sequence: Synthetic oligonucleotide"
ggaagcagccaactcttcctc

SEQ ID NO: 31674 - DNA, 21 bp, Artificial Sequence
  source: /note="Description of Artificial Sequence: Synthetic oligonucleotide"
ggaagcagcagagcagacgca

SEQ ID NO: 31675 - DNA, 21 bp, Artificial Sequence
  source: /note="Description of Artificial Sequence: Synthetic oligonucleotide"
ggaagcagcagccacgtcagc

SEQ ID NO: 31676 - DNA, 21 bp, Artificial Sequence
  source: /note="Description of Artificial Sequence: Synthetic oligonucleotide"
ggaagcagcagcatcgcaagc

SEQ ID NO: 31677 - DNA, 21 bp, Artificial Sequence
  source: /note="Description of Artificial Sequence: Synthetic oligonucleotide"
ggaagcagcagcctccacagc

SEQ ID NO: 31678 - DNA, 21 bp, Artificial Sequence
  source: /note="Description of Artificial Sequence: Synthetic oligonucleotide"
ggaagcagcagcaacgcaaga

SEQ ID NO: 31679 - DNA, 21 bp, Artificial Sequence
  source: /note="Description of Artificial Sequence: Synthetic oligonucleotide"
ggaagcagctaccacagccca

SEQ ID NO: 31680 - DNA, 21 bp, Artificial Sequence
  source: /note="Description of Artificial Sequence: Synthetic oligonucleotide"
ggaagcacaggagacagacaa

SEQ ID NO: 31681 - DNA, 21 bp, Artificial Sequence
  source: /note="Description of Artificial Sequence: Synthetic oligonucleotide"
ggaagcacaggaaacacagtc

SEQ ID NO: 31682 - DNA, 21 bp, Artificial Sequence
  source: /note="Description of Artificial Sequence: Synthetic oligonucleotide"
ggaagcacaggaagcgcagca

SEQ ID NO: 31683 - DNA, 21 bp, Artificial Sequence
  source: /note="Description of Artificial Sequence: Synthetic oligonucleotide"
ggaagcacaggaagcggacac

SEQ ID NO: 31684 - DNA, 21 bp, Artificial Sequence
  source: /note="Description of Artificial Sequence: Synthetic oligonucleotide"
ggaagcacaatgacaatcgca

SEQ ID NO: 31685 - DNA, 21 bp, Artificial Sequence
  source: /note="Description of Artificial Sequence: Synthetic oligonucleotide"
ggaagcacaaacgaactcgtc

SEQ ID NO: 31686 - DNA, 21 bp, Artificial Sequence
  source: /note="Description of Artificial Sequence: Synthetic oligonucleotide"
ggaagcacaaacccactcgca

SEQ ID NO: 31687 - DNA, 21 bp, Artificial Sequence
  source: /note="Description of Artificial Sequence: Synthetic oligonucleotide"
ggaagcacaaacagactcgca

SEQ ID NO: 31688 - DNA, 21 bp, Artificial Sequence
  source: /note="Description of Artificial Sequence: Synthetic oligonucleotide"
ggaagcacaaacagcccagca

SEQ ID NO: 31689 - DNA, 21 bp, Artificial Sequence
  source: /note="Description of Artificial Sequence: Synthetic oligonucleotide"
ggaagcacaccactcccactc

SEQ ID NO: 31690 - DNA, 21 bp, Artificial Sequence
  source: /note="Description of Artificial Sequence: Synthetic oligonucleotide"
ggaagcacacaaggaagcgga

SEQ ID NO: 31691 - DNA, 21 bp, Artificial Sequence
  source: /note="Description of Artificial Sequence: Synthetic oligonucleotide"
ggaagcacaagcaaagacaga

SEQ ID NO: 31692 - DNA, 21 bp, Artificial Sequence
  source: /note="Description of Artificial Sequence: Synthetic oligonucleotide"
ggaagcacaagcagcagaaca

SEQ ID NO: 31693 - DNA, 21 bp, Artificial Sequence
  source: /note="Description of Artificial Sequence: Synthetic oligonucleotide"
ggaagcacaacaagaccacaa

SEQ ID NO: 31694 - DNA, 21 bp, Artificial Sequence
  source: /note="Description of Artificial Sequence: Synthetic oligonucleotide"
ggaagcacatggagcagccca

SEQ ID NO: 31695 - DNA, 21 bp, Artificial Sequence
  source: /note="Description of Artificial Sequence: Synthetic oligonucleotide"
ggaagcacatacgcaagcatg

SEQ ID NO: 31696 - DNA, 21 bp, Artificial Sequence
  source: /note="Description of Artificial Sequence: Synthetic oligonucleotide"
ggaagcgtcgcagacagagtc

SEQ ID NO: 31697 - DNA, 21 bp, Artificial Sequence
  source: /note="Description of Artificial Sequence: Synthetic oligonucleotide"
ggaagcgtcgcaacaaaccca

SEQ ID NO: 31698 - DNA, 21 bp, Artificial Sequence
  source: /note="Description of Artificial Sequence: Synthetic oligonucleotide"
ggaagcgtcgaagaaagcaga

SEQ ID NO: 31699 - DNA, 21 bp, Artificial Sequence
  source: /note="Description of Artificial Sequence: Synthetic oligonucleotide"
ggaagcgtcaacccaagaagc

SEQ ID NO: 31700 - DNA, 21 bp, Artificial Sequence
  source: /note="Description of Artificial Sequence: Synthetic oligonucleotide"
ggaagcgtcccagacagcaga

SEQ ID NO: 31701 - DNA, 21 bp, Artificial Sequence
  source: /note="Description of Artificial Sequence: Synthetic oligonucleotide"
ggaagcgtcccaaacgtcatc

SEQ ID NO: 31702 - DNA, 21 bp, Artificial Sequence
  source: /note="Description of Artificial Sequence: Synthetic oligonucleotide"
ggaagcgtccaaatcagacca

SEQ ID NO: 31703 - DNA, 21 bp, Artificial Sequence
  source: /note="Description of Artificial Sequence: Synthetic oligonucleotide"
ggaagctacgcaaacgcagca

SEQ ID NO: 31704 - DNA, 21 bp, Artificial Sequence
  source: /note="Description of Artificial Sequence: Synthetic oligonucleotide"
ggaacagcagacctcgtccca

SEQ ID NO: 31705 - DNA, 21 bp, Artificial Sequence
  source: /note="Description of Artificial Sequence: Synthetic oligonucleotide"
ggaacagcacacctcaaacca

SEQ ID NO: 31706 - DNA, 21 bp, Artificial Sequence
  source: /note="Description of Artificial Sequence: Synthetic oligonucleotide"
ggaacagcaaacagaaacgca

SEQ ID NO: 31707 - DNA, 21 bp, Artificial Sequence
  source: /note="Description of Artificial Sequence: Synthetic oligonucleotide"
ggaacagcaccaagcgtcatg

SEQ ID NO: 31708 - DNA, 21 bp, Artificial Sequence
  source: /note="Description of Artificial Sequence: Synthetic oligonucleotide"
ggaacagcagtccaaagactc

SEQ ID NO: 31709 - DNA, 21 bp, Artificial Sequence
  source: /note="Description of Artificial Sequence: Synthetic oligonucleotide"
ggaacagacttcgtcccaagc

SEQ ID NO: 31710 - DNA, 21 bp, Artificial Sequence
  source: /note="Description of Artificial Sequence: Synthetic oligonucleotide"
ggaacagacatcagaatgcca

SEQ ID NO: 31711 - DNA, 21 bp, Artificial Sequence
  source: /note="Description of Artificial Sequence: Synthetic oligonucleotide"
ggaacagaagaattcggatac

SEQ ID NO: 31712 - DNA, 21 bp, Artificial Sequence
  source: /note="Description of Artificial Sequence: Synthetic oligonucleotide"
ggaacagaacacacaacagca

SEQ ID NO: 31713 - DNA, 21 bp, Artificial Sequence
  source: /note="Description of Artificial Sequence: Synthetic oligonucleotide"
ggaacagaaagcaacggaaga

SEQ ID NO: 31714 - DNA, 21 bp, Artificial Sequence
  source: /note="Description of Artificial Sequence: Synthetic oligonucleotide"
ggaacagaatacaacacatgc

SEQ ID NO: 31715 - DNA, 21 bp, Artificial Sequence
  source: /note="Description of Artificial Sequence: Synthetic oligonucleotide"
ggaacattcggaacaacagca

SEQ ID NO: 31716 - DNA, 21 bp, Artificial Sequence
  source: /note="Description of Artificial Sequence: Synthetic oligonucleotide"
ggaacattcaaagcaagccac

SEQ ID NO: 31717 - DNA, 21 bp, Artificial Sequence
  source: /note="Description of Artificial Sequence: Synthetic oligonucleotide"
ggaacaggaggagtcaaaatc

SEQ ID NO: 31718 - DNA, 21 bp, Artificial Sequence
  source: /note="Description of Artificial Sequence: Synthetic oligonucleotide"
ggaacaggaatcaaccacctc

SEQ ID NO: 31719 - DNA, 21 bp, Artificial Sequence
  source: /note="Description of Artificial Sequence: Synthetic oligonucleotide"
ggaacaggaaaaccaatggga

SEQ ID NO: 31720 - DNA, 21 bp, Artificial Sequence
  source: /note="Description of Artificial Sequence: Synthetic oligonucleotide"
ggaacaggaaacgtcggagca

SEQ ID NO: 31721 - DNA, 21 bp, Artificial Sequence
  source: /note="Description of Artificial Sequence: Synthetic oligonucleotide"
ggaacaggaccaagcgtccca

SEQ ID NO: 31722 - DNA, 21 bp, Artificial Sequence
  source: /note="Description of Artificial Sequence: Synthetic oligonucleotide"
ggaacaggaagagacggaagc

SEQ ID NO: 31723 - DNA, 21 bp, Artificial Sequence
  source: /note="Description of Artificial Sequence: Synthetic oligonucleotide"
ggaacaggaagcagagtcgtc

SEQ ID NO: 31724 - DNA, 21 bp, Artificial Sequence
  source: /note="Description of Artificial Sequence: Synthetic oligonucleotide"
ggaacaatctacggaccagtc

SEQ ID NO: 31725 - DNA, 21 bp, Artificial Sequence
  source: /note="Description of Artificial Sequence: Synthetic oligonucleotide"
ggaacaaaactctacacaaca

SEQ ID NO: 31726 - DNA, 21 bp, Artificial Sequence
  source: /note="Description of Artificial Sequence: Synthetic oligonucleotide"
ggaacaaaatacgcagcaagc

SEQ ID NO: 31727 - DNA, 21 bp, Artificial Sequence
  source: /note="Description of Artificial Sequence: Synthetic oligonucleotide"
ggaacactcgacacagtcatc

SEQ ID NO: 31728 - DNA, 21 bp, Artificial Sequence
  source: /note="Description of Artificial Sequence: Synthetic oligonucleotide"
ggaacactcgaatacagcatg

SEQ ID NO: 31729 - DNA, 21 bp, Artificial Sequence
  source: /note="Description of Artificial Sequence: Synthetic oligonucleotide"
ggaacactcggatgcagagaa

SEQ ID NO: 31730 - DNA, 21 bp, Artificial Sequence
  source: /note="Description of Artificial Sequence: Synthetic oligonucleotide"
ggaacactcggactcagacaa

SEQ ID NO: 31731 - DNA, 21 bp, Artificial Sequence
  source: /note="Description of Artificial Sequence: Synthetic oligonucleotide"
ggaacactccacggaagcgaa

SEQ ID NO: 31732 - DNA, 21 bp, Artificial Sequence
  source: /note="Description of Artificial Sequence: Synthetic oligonucleotide"
ggaacactcaactacgcaagc

SEQ ID NO: 31733 - DNA, 21 bp, Artificial Sequence
  source: /note="Description of Artificial Sequence: Synthetic oligonucleotide"
ggaacactcagcggactcgaa

SEQ ID NO: 31734 - DNA, 21 bp, Artificial Sequence
  source: /note="Description of Artificial Sequence: Synthetic oligonucleotide"
ggaacactcacaccaacaatg

SEQ ID NO: 31735 - DNA, 21 bp, Artificial Sequence
  source: /note="Description of Artificial Sequence: Synthetic oligonucleotide"
ggaacaatgaacgtcgtcatc

SEQ ID NO: 31736 - DNA, 21 bp, Artificial Sequence
  source: /note="Description of Artificial Sequence: Synthetic oligonucleotide"
ggaacaatgagcctcggacca

SEQ ID NO: 31737 - DNA, 21 bp, Artificial Sequence
  source: /note="Description of Artificial Sequence: Synthetic oligonucleotide"
ggaacaatgacaaacagcgca

SEQ ID NO: 31738 - DNA, 21 bp, Artificial Sequence
  source: /note="Description of Artificial Sequence: Synthetic oligonucleotide"
ggaacaaacggactcatgctc

SEQ ID NO: 31739 - DNA, 21 bp, Artificial Sequence
  source: /note="Description of Artificial Sequence: Synthetic oligonucleotide"
ggaacaaacggactcccagca

SEQ ID NO: 31740 - DNA, 21 bp, Artificial Sequence
  source: /note="Description of Artificial Sequence: Synthetic oligonucleotide"
ggaacaaaccacgcacaaaaa

SEQ ID NO: 31741 - DNA, 21 bp, Artificial Sequence
  source: /note="Description of Artificial Sequence: Synthetic oligonucleotide"
ggaacaaacccagtcctcaca

SEQ ID NO: 31742 - DNA, 21 bp, Artificial Sequence
  source: /note="Description of Artificial Sequence: Synthetic oligonucleotide"
ggaacaccagcacacgcagca

SEQ ID NO: 31743 - DNA, 21 bp, Artificial Sequence
  source: /note="Description of Artificial Sequence: Synthetic oligonucleotide"
ggaacaccagaaagactccca

SEQ ID NO: 31744 - DNA, 21 bp, Artificial Sequence
  source: /note="Description of Artificial Sequence: Synthetic oligonucleotide"
ggaacaccaatgacacaagga

SEQ ID NO: 31745 - DNA, 21 bp, Artificial Sequence
  source: /note="Description of Artificial Sequence: Synthetic oligonucleotide"
ggaacaccaaacaacagaaac

SEQ ID NO: 31746 - DNA, 21 bp, Artificial Sequence
  source: /note="Description of Artificial Sequence: Synthetic oligonucleotide"
ggaacaccaaacgtccacgga

SEQ ID NO: 31747 - DNA, 21 bp, Artificial Sequence
  source: /note="Description of Artificial Sequence: Synthetic oligonucleotide"
ggaacaccaccaggaccaagc

SEQ ID NO: 31748 - DNA, 21 bp, Artificial Sequence
  source: /note="Description of Artificial Sequence: Synthetic oligonucleotide"
ggaacaccaccaacaagactc

SEQ ID NO: 31749 - DNA, 21 bp, Artificial Sequence
  source: /note="Description of Artificial Sequence: Synthetic oligonucleotide"
ggaacaccagtcgtcgactgc

SEQ ID NO: 31750 - DNA, 21 bp, Artificial Sequence
  source: /note="Description of Artificial Sequence: Synthetic oligonucleotide"
ggaacacaagcagaaagacaa

SEQ ID NO: 31751 - DNA, 21 bp, Artificial Sequence
  source: /note="Description of Artificial Sequence: Synthetic oligonucleotide"
ggaacacaagcaagaatctgc

SEQ ID NO: 31752 - DNA, 21 bp, Artificial Sequence
  source: /note="Description of Artificial Sequence: Synthetic oligonucleotide"
ggaacacaaatggcaagagca

SEQ ID NO: 31753 - DNA, 21 bp, Artificial Sequence
  source: /note="Description of Artificial Sequence: Synthetic oligonucleotide"
ggaacacaaagcacatacgac

SEQ ID NO: 31754 - DNA, 21 bp, Artificial Sequence
  source: /note="Description of Artificial Sequence: Synthetic oligonucleotide"
ggaacaagaccagcacacgtc

SEQ ID NO: 31755 - DNA, 21 bp, Artificial Sequence
  source: /note="Description of Artificial Sequence: Synthetic oligonucleotide"
ggaacaagaagcacattcgca

SEQ ID NO: 31756 - DNA, 21 bp, Artificial Sequence
  source: /note="Description of Artificial Sequence: Synthetic oligonucleotide"
ggaacaagaacagtcgtcctc

SEQ ID NO: 31757 - DNA, 21 bp, Artificial Sequence
  source: /note="Description of Artificial Sequence: Synthetic oligonucleotide"
ggaacaagagtcctcagctac

SEQ ID NO: 31758 - DNA, 21 bp, Artificial Sequence
  source: /note="Description of Artificial Sequence: Synthetic oligonucleotide"
ggaacaagcggatacagccca

SEQ ID NO: 31759 - DNA, 21 bp, Artificial Sequence
  source: /note="Description of Artificial Sequence: Synthetic oligonucleotide"
ggaacaagcaacctcagccca

SEQ ID NO: 31760 - DNA, 21 bp, Artificial Sequence
  source: /note="Description of Artificial Sequence: Synthetic oligonucleotide"
ggaacaagcccagaccaaaaa

SEQ ID NO: 31761 - DNA, 21 bp, Artificial Sequence
  source: /note="Description of Artificial Sequence: Synthetic oligonucleotide"
ggaacaagcccagtcatgtgc

SEQ ID NO: 31762 - DNA, 21 bp, Artificial Sequence
  source: /note="Description of Artificial Sequence: Synthetic oligonucleotide"
ggaacaagccaaaaactccca

SEQ ID NO: 31763 - DNA, 21 bp, Artificial Sequence
  source: /note="Description of Artificial Sequence: Synthetic oligonucleotide"
ggaacaagccaaaaaacaagc

SEQ ID NO: 31764 - DNA, 21 bp, Artificial Sequence
  source: /note="Description of Artificial Sequence: Synthetic oligonucleotide"
ggaacaagcagcagagcacca

SEQ ID NO: 31765 - DNA, 21 bp, Artificial Sequence
  source: /note="Description of Artificial Sequence: Synthetic oligonucleotide"
ggaacaagcagcagcggactc

SEQ ID NO: 31766 - DNA, 21 bp, Artificial Sequence
  source: /note="Description of Artificial Sequence: Synthetic oligonucleotide"
ggaacaacagaaatccacagc

SEQ ID NO: 31767 - DNA, 21 bp, Artificial Sequence
  source: /note="Description of Artificial Sequence: Synthetic oligonucleotide"
ggaacaacacacacaaacatc

SEQ ID NO: 31768 - DNA, 21 bp, Artificial Sequence
  source: /note="Description of Artificial Sequence: Synthetic oligonucleotide"
ggaacaacaaaactcggacca

SEQ ID NO: 31769 - DNA, 21 bp, Artificial Sequence
  source: /note="Description of Artificial Sequence: Synthetic oligonucleotide"
ggaacaacaatggtcccagca

SEQ ID NO: 31770 - DNA, 21 bp, Artificial Sequence
  source: /note="Description of Artificial Sequence: Synthetic oligonucleotide"
ggaacaacaaacctcgcagga

SEQ ID NO: 31771 - DNA, 21 bp, Artificial Sequence
  source: /note="Description of Artificial Sequence: Synthetic oligonucleotide"
ggaacaacaaacaacatgttc

SEQ ID NO: 31772 - DNA, 21 bp, Artificial Sequence
  source: /note="Description of Artificial Sequence: Synthetic oligonucleotide"
ggaacaacaaacaacaacgca

SEQ ID NO: 31773 - DNA, 21 bp, Artificial Sequence
  source: /note="Description of Artificial Sequence: Synthetic oligonucleotide"
ggaacaacaagcgcagaaagc

SEQ ID NO: 31774 - DNA, 21 bp, Artificial Sequence
  source: /note="Description of Artificial Sequence: Synthetic oligonucleotide"
ggaacaacaagcccaaaaagc

SEQ ID NO: 31775 - DNA, 21 bp, Artificial Sequence
  source: /note="Description of Artificial Sequence: Synthetic oligonucleotide"
ggaacaacaagcagccacgaa

SEQ ID NO: 31776 - DNA, 21 bp, Artificial Sequence
  source: /note="Description of Artificial Sequence: Synthetic oligonucleotide"
ggaacaacaacaggacacagc

SEQ ID NO: 31777 - DNA, 21 bp, Artificial Sequence
  source: /note="Description of Artificial Sequence: Synthetic oligonucleotide"
ggaacagtcgacagaggacaa

SEQ ID NO: 31778 - DNA, 21 bp, Artificial Sequence
  source: /note="Description of Artificial Sequence: Synthetic oligonucleotide"
ggaacagtcggactcaacgtc

SEQ ID NO: 31779 - DNA, 21 bp, Artificial Sequence
  source: /note="Description of Artificial Sequence: Synthetic oligonucleotide"
ggaacagtcggaagcgacaga

SEQ ID NO: 31780 - DNA, 21 bp, Artificial Sequence
  source: /note="Description of Artificial Sequence: Synthetic oligonucleotide"
ggaacagtccacaacaacctc

SEQ ID NO: 31781 - DNA, 21 bp, Artificial Sequence
  source: /note="Description of Artificial Sequence: Synthetic oligonucleotide"
ggaacagtccacacaaacgca

SEQ ID NO: 31782 - DNA, 21 bp, Artificial Sequence
  source: /note="Description of Artificial Sequence: Synthetic oligonucleotide"
ggaacagtcccagaaggacca

SEQ ID NO: 31783 - DNA, 21 bp, Artificial Sequence
  source: /note="Description of Artificial Sequence: Synthetic oligonucleotide"
ggaacagtccaaaaaagcgac

SEQ ID NO: 31784 - DNA, 21 bp, Artificial Sequence
  source: /note="Description of Artificial Sequence: Synthetic oligonucleotide"
ggaacagtcagaagcgcagtc

SEQ ID NO: 31785 - DNA, 21 bp, Artificial Sequence
  source: /note="Description of Artificial Sequence: Synthetic oligonucleotide"
ggaacatacgcaaacgcagtc

SEQ ID NO: 31786 - DNA, 21 bp, Artificial Sequence
  source: /note="Description of Artificial Sequence: Synthetic oligonucleotide"
ggaacatacgtcgaaagcaca

SEQ ID NO: 31787 - DNA, 21 bp, Artificial Sequence
  source: /note="Description of Artificial Sequence: Synthetic oligonucleotide"
ggagtcgcacacgaaaaaaac

SEQ ID NO: 31788 - DNA, 21 bp, Artificial Sequence
  source: /note="Description of Artificial Sequence: Synthetic oligonucleotide"
ggagtcgcaaaactcctcgca

SEQ ID NO: 31789 - DNA, 21 bp, Artificial Sequence
  source: /note="Description of Artificial Sequence: Synthetic oligonucleotide"
ggagtcgcaagcagcccagga

SEQ ID NO: 31790 - DNA, 21 bp, Artificial Sequence
  source: /note="Description of Artificial Sequence: Synthetic oligonucleotide"
ggagtcgcaagcacaagagca

SEQ ID NO: 31791 - DNA, 21 bp, Artificial Sequence
  source: /note="Description of Artificial Sequence: Synthetic oligonucleotide"
ggagtcgcaacactcacactc

SEQ ID NO: 31792 - DNA, 21 bp, Artificial Sequence
  source: /note="Description of Artificial Sequence: Synthetic oligonucleotide"
ggagtcgcagtcacagaaaga

SEQ ID NO: 31793 - DNA, 21 bp, Artificial Sequence
  source: /note="Description of Artificial Sequence: Synthetic oligonucleotide"
ggagtctgcgcagaaagctgg

SEQ ID NO: 31794 - DNA, 21 bp, Artificial Sequence
  source: /note="Description of Artificial Sequence: Synthetic oligonucleotide"
ggagtcgacgtcaaatggagc

SEQ ID NO: 31795 - DNA, 21 bp, Artificial Sequence
  source: /note="Description of Artificial Sequence: Synthetic oligonucleotide"
ggagtcgaagcaatgagagca

SEQ ID NO: 31796 - DNA, 21 bp, Artificial Sequence
  source: /note="Description of Artificial Sequence: Synthetic oligonucleotide"
ggagtcgaacacaacgacagc

SEQ ID NO: 31797 - DNA, 21 bp, Artificial Sequence
  source: /note="Description of Artificial Sequence: Synthetic oligonucleotide"
ggagtcttcaaagaaacagga

SEQ ID NO: 31798 - DNA, 21 bp, Artificial Sequence
  source: /note="Description of Artificial Sequence: Synthetic oligonucleotide"
ggagtcggagcaagccacatc

SEQ ID NO: 31799 - DNA, 21 bp, Artificial Sequence
  source: /note="Description of Artificial Sequence: Synthetic oligonucleotide"
ggagtcggagcaagcagaagc

SEQ ID NO: 31800 - DNA, 21 bp, Artificial Sequence
  source: /note="Description of Artificial Sequence: Synthetic oligonucleotide"
ggagtcggaaacatgccagac

SEQ ID NO: 31801 - DNA, 21 bp, Artificial Sequence
  source: /note="Description of Artificial Sequence: Synthetic oligonucleotide"
ggagtcggacaagtcagaagc

SEQ ID NO: 31802 - DNA, 21 bp, Artificial Sequence
  source: /note="Description of Artificial Sequence: Synthetic oligonucleotide"
ggagtccacctcagcagccca

SEQ ID NO: 31803 - DNA, 21 bp, Artificial Sequence
  source: /note="Description of Artificial Sequence: Synthetic oligonucleotide"
ggagtccacagcatggtcgaa

SEQ ID NO: 31804 - DNA, 21 bp, Artificial Sequence
  source: /note="Description of Artificial Sequence: Synthetic oligonucleotide"
ggagtccacgtcaaaccagaa

SEQ ID NO: 31805 - DNA, 21 bp, Artificial Sequence
  source: /note="Description of Artificial Sequence: Synthetic oligonucleotide"
ggagtcatcgcacaccacagc

SEQ ID NO: 31806 - DNA, 21 bp, Artificial Sequence
  source: /note="Description of Artificial Sequence: Synthetic oligonucleotide"
ggagtcatcctcgcaagaatg

SEQ ID NO: 31807 - DNA, 21 bp, Artificial Sequence
  source: /note="Description of Artificial Sequence: Synthetic oligonucleotide"
ggagtcatcaacccaacactc

SEQ ID NO: 31808 - DNA, 21 bp, Artificial Sequence
  source: /note="Description of Artificial Sequence: Synthetic oligonucleotide"
ggagtcaaagcaagcatcctc

SEQ ID NO: 31809 - DNA, 21 bp, Artificial Sequence
  source: /note="Description of Artificial Sequence: Synthetic oligonucleotide"
ggagtcaaattcggaggaagc

SEQ ID NO: 31810 - DNA, 21 bp, Artificial Sequence
  source: /note="Description of Artificial Sequence: Synthetic oligonucleotide"
ggagtcaaacacggacactac

SEQ ID NO: 31811 - DNA, 21 bp, Artificial Sequence
  source: /note="Description of Artificial Sequence: Synthetic oligonucleotide"
ggagtcaaactcagcccaagc

SEQ ID NO: 31812 - DNA, 21 bp, Artificial Sequence
  source: /note="Description of Artificial Sequence: Synthetic oligonucleotide"
ggagtcaaaccagacccagtc

SEQ ID NO: 31813 - DNA, 21 bp, Artificial Sequence
  source: /note="Description of Artificial Sequence: Synthetic oligonucleotide"
ggagtcctcggaccaccactc

SEQ ID NO: 31814 - DNA, 21 bp, Artificial Sequence
  source: /note="Description of Artificial Sequence: Synthetic oligonucleotide"
ggagtcctcagaatgagcagc

SEQ ID NO: 31815 - DNA, 21 bp, Artificial Sequence
  source: /note="Description of Artificial Sequence: Synthetic oligonucleotide"
ggagtcctcacaaacatcctc

SEQ ID NO: 31816 - DNA, 21 bp, Artificial Sequence
  source: /note="Description of Artificial Sequence: Synthetic oligonucleotide"
ggagtcaacgaaagaaacgtc

SEQ ID NO: 31817 - DNA, 21 bp, Artificial Sequence
  source: /note="Description of Artificial Sequence: Synthetic oligonucleotide"
ggagtcaacatcacaagcctc

SEQ ID NO: 31818 - DNA, 21 bp, Artificial Sequence
  source: /note="Description of Artificial Sequence: Synthetic oligonucleotide"
ggagtcaacccaagcagactc

SEQ ID NO: 31819 - DNA, 21 bp, Artificial Sequence
  source: /note="Description of Artificial Sequence: Synthetic oligonucleotide"
ggagtcccagcaacaagctac

SEQ ID NO: 31820 - DNA, 21 bp, Artificial Sequence
  source: /note="Description of Artificial Sequence: Synthetic oligonucleotide"
ggagtcccaggaatcagcgca

SEQ ID NO: 31821 - DNA, 21 bp, Artificial Sequence
  source: /note="Description of Artificial Sequence: Synthetic oligonucleotide"
ggagtcccaatccaaacacca

SEQ ID NO: 31822 - DNA, 21 bp, Artificial Sequence
  source: /note="Description of Artificial Sequence: Synthetic oligonucleotide"
ggagtcagagacatgggactc

SEQ ID NO: 31823 - DNA, 21 bp, Artificial Sequence
  source: /note="Description of Artificial Sequence: Synthetic oligonucleotide"
ggagtcagaggagcaccactc

SEQ ID NO: 31824 - DNA, 21 bp, Artificial Sequence
  source: /note="Description of Artificial Sequence: Synthetic oligonucleotide"
ggagtcagactcgacgcaaca

SEQ ID NO: 31825 - DNA, 21 bp, Artificial Sequence
  source: /note="Description of Artificial Sequence: Synthetic oligonucleotide"
ggagtcagactcaacgaaaca

SEQ ID NO: 31826 - DNA, 21 bp, Artificial Sequence
  source: /note="Description of Artificial Sequence: Synthetic oligonucleotide"
ggagtcagactccaaaacgca

SEQ ID NO: 31827 - DNA, 21 bp, Artificial Sequence
  source: /note="Description of Artificial Sequence: Synthetic oligonucleotide"
ggagtcagaagccacacaatg

SEQ ID NO: 31828 - DNA, 21 bp, Artificial Sequence
  source: /note="Description of Artificial Sequence: Synthetic oligonucleotide"
ggagtcagcttccaaagcatg

SEQ ID NO: 31829 - DNA, 21 bp, Artificial Sequence
  source: /note="Description of Artificial Sequence: Synthetic oligonucleotide"
ggagtcagcaaaatcgacagc

SEQ ID NO: 31830 - DNA, 21 bp, Artificial Sequence
  source: /note="Description of Artificial Sequence: Synthetic oligonucleotide"
ggagtcagcagaagcgcaaac

SEQ ID NO: 31831 - DNA, 21 bp, Artificial Sequence
  source: /note="Description of Artificial Sequence: Synthetic oligonucleotide"
ggagtcagcagcagccaaaga

SEQ ID NO: 31832 - DNA, 21 bp, Artificial Sequence
  source: /note="Description of Artificial Sequence: Synthetic oligonucleotide"
ggagtcagcagcgtccaaagc

SEQ ID NO: 31833 - DNA, 21 bp, Artificial Sequence
  source: /note="Description of Artificial Sequence: Synthetic oligonucleotide"
ggagtcagcacagcaagaatc

SEQ ID NO: 31834 - DNA, 21 bp, Artificial Sequence
  source: /note="Description of Artificial Sequence: Synthetic oligonucleotide"
ggagtcagcgtcagcagacca

SEQ ID NO: 31835 - DNA, 21 bp, Artificial Sequence
  source: /note="Description of Artificial Sequence: Synthetic oligonucleotide"
ggagtcacaaaagcagtcagc

SEQ ID NO: 31836 - DNA, 21 bp, Artificial Sequence
  source: /note="Description of Artificial Sequence: Synthetic oligonucleotide"
ggagtcacaccaagctacagc

SEQ ID NO: 31837 - DNA, 21 bp, Artificial Sequence
  source: /note="Description of Artificial Sequence: Synthetic oligonucleotide"
ggagtcacacaagcaacagca

SEQ ID NO: 31838 - DNA, 21 bp, Artificial Sequence
  source: /note="Description of Artificial Sequence: Synthetic oligonucleotide"
ggagtcacaagcggaggagga

SEQ ID NO: 31839 - DNA, 21 bp, Artificial Sequence
  source: /note="Description of Artificial Sequence: Synthetic oligonucleotide"
ggagtcacaagcacaagcagc

SEQ ID NO: 31840 - DNA, 21 bp, Artificial Sequence
  source: /note="Description of Artificial Sequence: Synthetic oligonucleotide"
ggagtcacaacaagcatccac

SEQ ID NO: 31841 - DNA, 21 bp, Artificial Sequence
  source: /note="Description of Artificial Sequence: Synthetic oligonucleotide"
ggagtcacaacatacagcgca

SEQ ID NO: 31842 - DNA, 21 bp, Artificial Sequence
  source: /note="Description of Artificial Sequence: Synthetic oligonucleotide"
ggagtcgtcggaagccaccac

SEQ ID NO: 31843 - DNA, 21 bp, Artificial Sequence
  source: /note="Description of Artificial Sequence: Synthetic oligonucleotide"
ggagtcgtccacacaagaaca

SEQ ID NO: 31844 - DNA, 21 bp, Artificial Sequence
  source: /note="Description of Artificial Sequence: Synthetic oligonucleotide"
ggatgggcactcacaaacgga

SEQ ID NO: 31845 - DNA, 21 bp, Artificial Sequence
  source: /note="Description of Artificial Sequence: Synthetic oligonucleotide"
ggatgggaaccaacaagcgac

SEQ ID NO: 31846 - DNA, 21 bp, Artificial Sequence
  source: /note="Description of Artificial Sequence: Synthetic oligonucleotide"
ggatggggagcagaaacaatc

SEQ ID NO: 31847 - DNA, 21 bp, Artificial Sequence
  source: /note="Description of Artificial Sequence: Synthetic oligonucleotide"
ggatggggactcgtcaacgac

SEQ ID NO: 31848 - DNA, 21 bp, Artificial Sequence
  source: /note="Description of Artificial Sequence: Synthetic oligonucleotide"
ggatggcacccagcactccca

SEQ ID NO: 31849 - DNA, 21 bp, Artificial Sequence
  source: /note="Description of Artificial Sequence: Synthetic oligonucleotide"
ggatggaaaggacacgcagac

SEQ ID NO: 31850 - DNA, 21 bp, Artificial Sequence
  source: /note="Description of Artificial Sequence: Synthetic oligonucleotide"
ggatggaacgcagacgcaagc

SEQ ID NO: 31851 - DNA, 21 bp, Artificial Sequence
  source: /note="Description of Artificial Sequence: Synthetic oligonucleotide"
ggatggaacgtcgacggactc

SEQ ID NO: 31852 - DNA, 21 bp, Artificial Sequence
  source: /note="Description of Artificial Sequence: Synthetic oligonucleotide"
ggatggccaccaaaatacgaa

SEQ ID NO: 31853 - DNA, 21 bp, Artificial Sequence
  source: /note="Description of Artificial Sequence: Synthetic oligonucleotide"
ggatggcaaggacacaacctc

SEQ ID NO: 31854 - DNA, 21 bp, Artificial Sequence
  source: /note="Description of Artificial Sequence: Synthetic oligonucleotide"
ggatggagagaagtcgtcgac

SEQ ID NO: 31855 - DNA, 21 bp, Artificial Sequence
  source: /note="Description of Artificial Sequence: Synthetic oligonucleotide"
ggatggagaagcgaactcgaa

SEQ ID NO: 31856 - DNA, 21 bp, Artificial Sequence
  source: /note="Description of Artificial Sequence: Synthetic oligonucleotide"
ggatggagcagcgcaggacac

SEQ ID NO: 31857 - DNA, 21 bp, Artificial Sequence
  source: /note="Description of Artificial Sequence: Synthetic oligonucleotide"
ggatacgcaatgccagtccca

SEQ ID NO: 31858 - DNA, 21 bp, Artificial Sequence
  source: /note="Description of Artificial Sequence: Synthetic oligonucleotide"
ggatacgcaatgagcagcagc

SEQ ID NO: 31859 - DNA, 21 bp, Artificial Sequence
  source: /note="Description of Artificial Sequence: Synthetic oligonucleotide"
ggatacgcaacaacagtccac

SEQ ID NO: 31860 - DNA, 21 bp, Artificial Sequence
  source: /note="Description of Artificial Sequence: Synthetic oligonucleotide"
ggatacgacttcaacccagga

SEQ ID NO: 31861 - DNA, 21 bp, Artificial Sequence
  source: /note="Description of Artificial Sequence: Synthetic oligonucleotide"
ggatacggaccaatgagacaa

SEQ ID NO: 31862 - DNA, 21 bp, Artificial Sequence
  source: /note="Description of Artificial Sequence: Synthetic oligonucleotide"
ggatacggacaagcatacaca

SEQ ID NO: 31863 - DNA, 21 bp, Artificial Sequence
  source: /note="Description of Artificial Sequence: Synthetic oligonucleotide"
ggatacatccacgtcagcgga

SEQ ID NO: 31864 - DNA, 21 bp, Artificial Sequence
  source: /note="Description of Artificial Sequence: Synthetic oligonucleotide"
ggatacaaaacagcaacacaa

SEQ ID NO: 31865 - DNA, 21 bp, Artificial Sequence
  source: /note="Description of Artificial Sequence: Synthetic oligonucleotide"
ggatacctcccagtcgaccac

SEQ ID NO: 31866 - DNA, 21 bp, Artificial Sequence
  source: /note="Description of Artificial Sequence: Synthetic oligonucleotide"
ggatacctcagcgaaacacac

SEQ ID NO: 31867 - DNA, 21 bp, Artificial Sequence
  source: /note="Description of Artificial Sequence: Synthetic oligonucleotide"
ggatacctcagcaaaatgcca

SEQ ID NO: 31868 - DNA, 21 bp, Artificial Sequence
  source: /note="Description of Artificial Sequence: Synthetic oligonucleotide"
ggatacctcacagaaagactc

SEQ ID NO: 31869 - DNA, 21 bp, Artificial Sequence
  source: /note="Description of Artificial Sequence: Synthetic oligonucleotide"
ggatacatgatcaaaatgcca

SEQ ID NO: 31870 - DNA, 21 bp, Artificial Sequence
  source: /note="Description of Artificial Sequence: Synthetic oligonucleotide"
ggatacccaagccacgcagca

SEQ ID NO: 31871 - DNA, 21 bp, Artificial Sequence
  source: /note="Description of Artificial Sequence: Synthetic oligonucleotide"
ggatacccaagcaaaggacca

SEQ ID NO: 31872 - DNA, 21 bp, Artificial Sequence
  source: /note="Description of Artificial Sequence: Synthetic oligonucleotide"
ggatacccaacagcaagcgca

SEQ ID NO: 31873 - DNA, 21 bp, Artificial Sequence
  source: /note="Description of Artificial Sequence: Synthetic oligonucleotide"
ggatacccagtcggaccagca

SEQ ID NO: 31874 - DNA, 21 bp, Artificial Sequence
  source: /note="Description of Artificial Sequence: Synthetic oligonucleotide"
ggataccaaagcagatgcgca

SEQ ID NO: 31875 - DNA, 21 bp, Artificial Sequence
  source: /note="Description of Artificial Sequence: Synthetic oligonucleotide"
ggatacagagcaacagaaaca

SEQ ID NO: 31876 - DNA, 21 bp, Artificial Sequence
  source: /note="Description of Artificial Sequence: Synthetic oligonucleotide"
ggatacagactcatgccagaa

SEQ ID NO: 31877 - DNA, 21 bp, Artificial Sequence
  source: /note="Description of Artificial Sequence: Synthetic oligonucleotide"
ggatacagaagcaacgaaaca

SEQ ID NO: 31878 - DNA, 21 bp, Artificial Sequence
  source: /note="Description of Artificial Sequence: Synthetic oligonucleotide"
ggatacagcctcccagtcaca

SEQ ID NO: 31879 - DNA, 21 bp, Artificial Sequence
  source: /note="Description of Artificial Sequence: Synthetic oligonucleotide"
ggatacagcaacaacaaacca

SEQ ID NO: 31880 - DNA, 21 bp, Artificial Sequence
  source: /note="Description of Artificial Sequence: Synthetic oligonucleotide"
ggatacacaagcggacaacca

SEQ ID NO: 31881 - DNA, 21 bp, Artificial Sequence
  source: /note="Description of Artificial Sequence: Synthetic oligonucleotide"
ggatacgtcccagtcagccaa

SEQ ID NO: 31882 - DNA, 21 bp, Artificial Sequence
  source: /note="Description of Artificial Sequence: Synthetic oligonucleotide"
ggatactgggcaagcagcaac

SEQ ID NO: 31883 - DNA, 21 bp, Artificial Sequence
  source: /note="Description of Artificial Sequence: Synthetic oligonucleotide"
cacgcagcagcacaaccaagc

SEQ ID NO: 31884 - DNA, 21 bp, Artificial Sequence
  source: /note="Description of Artificial Sequence: Synthetic oligonucleotide"
cacgcagcacaccaaagcctc

SEQ ID NO: 31885 - DNA, 21 bp, Artificial Sequence
  source: /note="Description of Artificial Sequence: Synthetic oligonucleotide"
cacgcagcaagcccaatggtc

SEQ ID NO: 31886 - DNA, 21 bp, Artificial Sequence
  source: /note="Description of Artificial Sequence: Synthetic oligonucleotide"
cacgcagcaagcagcgtccca

SEQ ID NO: 31887 - DNA, 21 bp, Artificial Sequence
  source: /note="Description of Artificial Sequence: Synthetic oligonucleotide"
cacgcagaaagcgcacaccca

SEQ ID NO: 31888 - DNA, 21 bp, Artificial Sequence
  source: /note="Description of Artificial Sequence: Synthetic oligonucleotide"
cacgcaggaacagtcaaaatg

SEQ ID NO: 31889 - DNA, 21 bp, Artificial Sequence
  source: /note="Description of Artificial Sequence: Synthetic oligonucleotide"
cacgcacacctcacaccaagc

SEQ ID NO: 31890 - DNA, 21 bp, Artificial Sequence
  source: /note="Description of Artificial Sequence: Synthetic oligonucleotide"
cacgcaatcccaacactcctc

SEQ ID NO: 31891 - DNA, 21 bp, Artificial Sequence
  source: /note="Description of Artificial Sequence: Synthetic oligonucleotide"
cacgcaaaaagcagaaacgaa

SEQ ID NO: 31892 - DNA, 21 bp, Artificial Sequence
  source: /note="Description of Artificial Sequence: Synthetic oligonucleotide"
cacgcaaaaagcgtcagcgca

SEQ ID NO: 31893 - DNA, 21 bp, Artificial Sequence
  source: /note="Description of Artificial Sequence: Synthetic oligonucleotide"
cacgcaaaaacagcactcaca

SEQ ID NO: 31894 - DNA, 21 bp, Artificial Sequence
  source: /note="Description of Artificial Sequence: Synthetic oligonucleotide"
cacgcaaaagtcatgagagac

SEQ ID NO: 31895 - DNA, 21 bp, Artificial Sequence
  source: /note="Description of Artificial Sequence: Synthetic oligonucleotide"
cacgcactcgaacacttccca

SEQ ID NO: 31896 - DNA, 21 bp, Artificial Sequence
  source: /note="Description of Artificial Sequence: Synthetic oligonucleotide"
cacgcactcagaaacacaatg

SEQ ID NO: 31897 - DNA, 21 bp, Artificial Sequence
  source: /note="Description of Artificial Sequence: Synthetic oligonucleotide"
cacgcactcagcgacagccca

SEQ ID NO: 31898 - DNA, 21 bp, Artificial Sequence
  source: /note="Description of Artificial Sequence: Synthetic oligonucleotide"
cacgcaatgagcagcaacgtc

SEQ ID NO: 31899 - DNA, 21 bp, Artificial Sequence
  source: /note="Description of Artificial Sequence: Synthetic oligonucleotide"
cacgcaaacaaacacacacaa

SEQ ID NO: 31900 - DNA, 21 bp, Artificial Sequence
  source: /note="Description of Artificial Sequence: Synthetic oligonucleotide"
cacgcaaacaacgacccacac

SEQ ID NO: 31901 - DNA, 21 bp, Artificial Sequence
  source: /note="Description of Artificial Sequence: Synthetic oligonucleotide"
cacgcaaacccactcaacgga

SEQ ID NO: 31902 - DNA, 21 bp, Artificial Sequence
  source: /note="Description of Artificial Sequence: Synthetic oligonucleotide"
cacgcaaacccagtcgtcgga

SEQ ID NO: 31903 - DNA, 21 bp, Artificial Sequence
  source: /note="Description of Artificial Sequence: Synthetic oligonucleotide"
cacgcaaacagcacaacaaga

SEQ ID NO: 31904 - DNA, 21 bp, Artificial Sequence
  source: /note="Description of Artificial Sequence: Synthetic oligonucleotide"
cacgcaaacacaacaaacaca

SEQ ID NO: 31905 - DNA, 21 bp, Artificial Sequence
  source: /note="Description of Artificial Sequence: Synthetic oligonucleotide"
cacgcaccaccaaactacgca

SEQ ID NO: 31906 - DNA, 21 bp, Artificial Sequence
  source: /note="Description of Artificial Sequence: Synthetic oligonucleotide"
cacgcacaactcagcggaaca

SEQ ID NO: 31907 - DNA, 21 bp, Artificial Sequence
  source: /note="Description of Artificial Sequence: Synthetic oligonucleotide"
cacgcacaacaaggaggactc

SEQ ID NO: 31908 - DNA, 21 bp, Artificial Sequence
  source: /note="Description of Artificial Sequence: Synthetic oligonucleotide"
cacgcacaagtcgaaacactc

SEQ ID NO: 31909 - DNA, 21 bp, Artificial Sequence
  source: /note="Description of Artificial Sequence: Synthetic oligonucleotide"
cacgcaagagacagcagccca

SEQ ID NO: 31910 - DNA, 21 bp, Artificial Sequence
  source: /note="Description of Artificial Sequence: Synthetic oligonucleotide"
cacgcaagagacacattccca

SEQ ID NO: 31911 - DNA, 21 bp, Artificial Sequence
  source: /note="Description of Artificial Sequence: Synthetic oligonucleotide"
cacgcaagaatcgacagcagc

SEQ ID NO: 31912 - DNA, 21 bp, Artificial Sequence
  source: /note="Description of Artificial Sequence: Synthetic oligonucleotide"
cacgcaagaccaggaggactc

SEQ ID NO: 31913 - DNA, 21 bp, Artificial Sequence
  source: /note="Description of Artificial Sequence: Synthetic oligonucleotide"
cacgcaagagtcgaagcaaca

SEQ ID NO: 31914 - DNA, 21 bp, Artificial Sequence
  source: /note="Description of Artificial Sequence: Synthetic oligonucleotide"
cacgcaagcggaccagaccac

SEQ ID NO: 31915 - DNA, 21 bp, Artificial Sequence
  source: /note="Description of Artificial Sequence: Synthetic oligonucleotide"
cacgcaagcctcagcctcagc

SEQ ID NO: 31916 - DNA, 21 bp, Artificial Sequence
  source: /note="Description of Artificial Sequence: Synthetic oligonucleotide"
cacgcaagcaacagccaacac

SEQ ID NO: 31917 - DNA, 21 bp, Artificial Sequence
  source: /note="Description of Artificial Sequence: Synthetic oligonucleotide"
cacgcaagcccaggacaaaca

SEQ ID NO: 31918 - DNA, 21 bp, Artificial Sequence
  source: /note="Description of Artificial Sequence: Synthetic oligonucleotide"
cacgcaagcagaatcggagtc

SEQ ID NO: 31919 - DNA, 21 bp, Artificial Sequence
  source: /note="Description of Artificial Sequence: Synthetic oligonucleotide"
cacgcaagcagcaaaccagac

SEQ ID NO: 31920 - DNA, 21 bp, Artificial Sequence
  source: /note="Description of Artificial Sequence: Synthetic oligonucleotide"
cacgcaagcagcacaagacaa

SEQ ID NO: 31921 - DNA, 21 bp, Artificial Sequence
  source: /note="Description of Artificial Sequence: Synthetic oligonucleotide"
cacgcaagcacagtcagaaca

SEQ ID NO: 31922 - DNA, 21 bp, Artificial Sequence
  source: /note="Description of Artificial Sequence: Synthetic oligonucleotide"
cacgcaacagaccaaccacac

SEQ ID NO: 31923 - DNA, 21 bp, Artificial Sequence
  source: /note="Description of Artificial Sequence: Synthetic oligonucleotide"
cacgcaacagaaatggtcaga

SEQ ID NO: 31924 - DNA, 21 bp, Artificial Sequence
  source: /note="Description of Artificial Sequence: Synthetic oligonucleotide"
cacgcaacaatcagaacacac

SEQ ID NO: 31925 - DNA, 21 bp, Artificial Sequence
  source: /note="Description of Artificial Sequence: Synthetic oligonucleotide"
cacgcaacaagcaaactcaca

SEQ ID NO: 31926 - DNA, 21 bp, Artificial Sequence
  source: /note="Description of Artificial Sequence: Synthetic oligonucleotide"
cacgcagtcgaccacaaaagc

SEQ ID NO: 31927 - DNA, 21 bp, Artificial Sequence
  source: /note="Description of Artificial Sequence: Synthetic oligonucleotide"
cacgcagtcgaactcgcagac

SEQ ID NO: 31928 - DNA, 21 bp, Artificial Sequence
  source: /note="Description of Artificial Sequence: Synthetic oligonucleotide"
cacgcatacacactcgacgga

SEQ ID NO: 31929 - DNA, 21 bp, Artificial Sequence
  source: /note="Description of Artificial Sequence: Synthetic oligonucleotide"
cacgacgcaagcgtccacaga

SEQ ID NO: 31930 - DNA, 21 bp, Artificial Sequence
  source: /note="Description of Artificial Sequence: Synthetic oligonucleotide"
cacgacgacgcatggacagca

SEQ ID NO: 31931 - DNA, 21 bp, Artificial Sequence
  source: /note="Description of Artificial Sequence: Synthetic oligonucleotide"
cacgacggaagagtcaacctc

SEQ ID NO: 31932 - DNA, 21 bp, Artificial Sequence
  source: /note="Description of Artificial Sequence: Synthetic oligonucleotide"
cacgacggaagcagaagcaca

SEQ ID NO: 31933 - DNA, 21 bp, Artificial Sequence
  source: /note="Description of Artificial Sequence: Synthetic oligonucleotide"
cacgaccacctcggaacacca

SEQ ID NO: 31934 - DNA, 21 bp, Artificial Sequence
  source: /note="Description of Artificial Sequence: Synthetic oligonucleotide"
cacgacatcgcaaaaacaaac

SEQ ID NO: 31935 - DNA, 21 bp, Artificial Sequence
  source: /note="Description of Artificial Sequence: Synthetic oligonucleotide"
cacgacatcgaattcaacaca

SEQ ID NO: 31936 - DNA, 21 bp, Artificial Sequence
  source: /note="Description of Artificial Sequence: Synthetic oligonucleotide"
cacgacctcgcatacagacca

SEQ ID NO: 31937 - DNA, 21 bp, Artificial Sequence
  source: /note="Description of Artificial Sequence: Synthetic oligonucleotide"
cacgacctcaacccagaaaac

SEQ ID NO: 31938 - DNA, 21 bp, Artificial Sequence
  source: /note="Description of Artificial Sequence: Synthetic oligonucleotide"
cacgacaacagaatcaacgac

SEQ ID NO: 31939 - DNA, 21 bp, Artificial Sequence
  source: /note="Description of Artificial Sequence: Synthetic oligonucleotide"
cacgacccacacgcagtcaca

SEQ ID NO: 31940 - DNA, 21 bp, Artificial Sequence
  source: /note="Description of Artificial Sequence: Synthetic oligonucleotide"
cacgacccaatcagactcgga

SEQ ID NO: 31941 - DNA, 21 bp, Artificial Sequence
  source: /note="Description of Artificial Sequence: Synthetic oligonucleotide"
cacgacccaatgatgctcctc

SEQ ID NO: 31942 - DNA, 21 bp, Artificial Sequence
  source: /note="Description of Artificial Sequence: Synthetic oligonucleotide"
cacgacccaagcgacggagca

SEQ ID NO: 31943 - DNA, 21 bp, Artificial Sequence
  source: /note="Description of Artificial Sequence: Synthetic oligonucleotide"
cacgacagaatcgcaggactc

SEQ ID NO: 31944 - DNA, 21 bp, Artificial Sequence
  source: /note="Description of Artificial Sequence: Synthetic oligonucleotide"
cacgacagagtcagcagcgga

SEQ ID NO: 31945 - DNA, 21 bp, Artificial Sequence
  source: /note="Description of Artificial Sequence: Synthetic oligonucleotide"
cacgacagcgcaagacaccca

SEQ ID NO: 31946 - DNA, 21 bp, Artificial Sequence
  source: /note="Description of Artificial Sequence: Synthetic oligonucleotide"
cacgacagcctcagcgaaaaa

SEQ ID NO: 31947 - DNA, 21 bp, Artificial Sequence
  source: /note="Description of Artificial Sequence: Synthetic oligonucleotide"
cacgacagcagattcgcaaac

SEQ ID NO: 31948 - DNA, 21 bp, Artificial Sequence
  source: /note="Description of Artificial Sequence: Synthetic oligonucleotide"
cacgacagcacactcggaagc

SEQ ID NO: 31949 - DNA, 21 bp, Artificial Sequence
  source: /note="Description of Artificial Sequence: Synthetic oligonucleotide"
cacgacacaatccacggaatc

SEQ ID NO: 31950 - DNA, 21 bp, Artificial Sequence
  source: /note="Description of Artificial Sequence: Synthetic oligonucleotide"
cacgacgtcccaaaaaaccca

SEQ ID NO: 31951 - DNA, 21 bp, Artificial Sequence
  source: /note="Description of Artificial Sequence: Synthetic oligonucleotide"
cacgactacccaagacaactc

SEQ ID NO: 31952 - DNA, 21 bp, Artificial Sequence
  source: /note="Description of Artificial Sequence: Synthetic oligonucleotide"
cacgaagcactcctcccaaac

SEQ ID NO: 31953 - DNA, 21 bp, Artificial Sequence
  source: /note="Description of Artificial Sequence: Synthetic oligonucleotide"
cacgaagcactcacaggactc

SEQ ID NO: 31954 - DNA, 21 bp, Artificial Sequence
  source: /note="Description of Artificial Sequence: Synthetic oligonucleotide"
cacgaagacggaagcgcaatg

SEQ ID NO: 31955 - DNA, 21 bp, Artificial Sequence
  source: /note="Description of Artificial Sequence: Synthetic oligonucleotide"
cacgaattcggagtcgcattc

SEQ ID NO: 31956 - DNA, 21 bp, Artificial Sequence
  source: /note="Description of Artificial Sequence: Synthetic oligonucleotide"
cacgaaggaggacacccatac

SEQ ID NO: 31957 - DNA, 21 bp, Artificial Sequence
  source: /note="Description of Artificial Sequence: Synthetic oligonucleotide"
cacgaaggacacagaggagtc

SEQ ID NO: 31958 - DNA, 21 bp, Artificial Sequence
  source: /note="Description of Artificial Sequence: Synthetic oligonucleotide"
cacgaaaaagtcagagtccac

SEQ ID NO: 31959 - DNA, 21 bp, Artificial Sequence
  source: /note="Description of Artificial Sequence: Synthetic oligonucleotide"
cacgaacaagcaagaagcatc

SEQ ID NO: 31960 - DNA, 21 bp, Artificial Sequence
  source: /note="Description of Artificial Sequence: Synthetic oligonucleotide"
cacgaacaatgcgaagcatac

SEQ ID NO: 31961 - DNA, 21 bp, Artificial Sequence
  source: /note="Description of Artificial Sequence: Synthetic oligonucleotide"
cacgaacaagtcgaaagacca

SEQ ID NO: 31962 - DNA, 21 bp, Artificial Sequence
  source: /note="Description of Artificial Sequence: Synthetic oligonucleotide"
cacgaaagcgaccaattccca

SEQ ID NO: 31963 - DNA, 21 bp, Artificial Sequence
  source: /note="Description of Artificial Sequence: Synthetic oligonucleotide"
cacgaaacaagagtcatgagc

SEQ ID NO: 31964 - DNA, 21 bp, Artificial Sequence
  source: /note="Description of Artificial Sequence: Synthetic oligonucleotide"
cacgaagtcggattcatggga

SEQ ID NO: 31965 - DNA, 21 bp, Artificial Sequence
  source: /note="Description of Artificial Sequence: Synthetic oligonucleotide"
cacgaagtcaaccacaacaca

SEQ ID NO: 31966 - DNA, 21 bp, Artificial Sequence
  source: /note="Description of Artificial Sequence: Synthetic oligonucleotide"
cacgaagtcagattcagccaa

SEQ ID NO: 31967 - DNA, 21 bp, Artificial Sequence
  source: /note="Description of Artificial Sequence: Synthetic oligonucleotide"
cacgaagtcagcgtcaaatgc

SEQ ID NO: 31968 - DNA, 21 bp, Artificial Sequence
  source: /note="Description of Artificial Sequence: Synthetic oligonucleotide"
cacgaagtctacagaaacatg

SEQ ID NO: 31969 - DNA, 21 bp, Artificial Sequence
  source: /note="Description of Artificial Sequence: Synthetic oligonucleotide"
cacttcgcacaagcaccaagc

SEQ ID NO: 31970 - DNA, 21 bp, Artificial Sequence
  source: /note="Description of Artificial Sequence: Synthetic oligonucleotide"
cacttcggaagcagcatccca

SEQ ID NO: 31971 - DNA, 21 bp, Artificial Sequence
  source: /note="Description of Artificial Sequence: Synthetic oligonucleotide"
cacttcggaacaaacggagac

SEQ ID NO: 31972 - DNA, 21 bp, Artificial Sequence
  source: /note="Description of Artificial Sequence: Synthetic oligonucleotide"
cacttcaacgacgcaacagtc

SEQ ID NO: 31973 - DNA, 21 bp, Artificial Sequence
  source: /note="Description of Artificial Sequence: Synthetic oligonucleotide"
cacttcaacagcagcagcaga

SEQ ID NO: 31974 - DNA, 21 bp, Artificial Sequence
  source: /note="Description of Artificial Sequence: Synthetic oligonucleotide"
cacttcagaggagcaatgctc

SEQ ID NO: 31975 - DNA, 21 bp, Artificial Sequence
  source: /note="Description of Artificial Sequence: Synthetic oligonucleotide"
cacttcagccacgaaagaagc

SEQ ID NO: 31976 - DNA, 21 bp, Artificial Sequence
  source: /note="Description of Artificial Sequence: Synthetic oligonucleotide"
cacttcagcccaaaaggaaca

SEQ ID NO: 31977 - DNA, 21 bp, Artificial Sequence
  source: /note="Description of Artificial Sequence: Synthetic oligonucleotide"
cacttcagcagcacaacaatc

SEQ ID NO: 31978 - DNA, 21 bp, Artificial Sequence
  source: /note="Description of Artificial Sequence: Synthetic oligonucleotide"
cacttcacaagcagagaactc

SEQ ID NO: 31979 - DNA, 21 bp, Artificial Sequence
  source: /note="Description of Artificial Sequence: Synthetic oligonucleotide"
cacttcacaagcacaccaagc

SEQ ID NO: 31980 - DNA, 21 bp, Artificial Sequence
  source: /note="Description of Artificial Sequence: Synthetic oligonucleotide"
cacttcgtcccaagcagcgca

SEQ ID NO: 31981 - DNA, 21 bp, Artificial Sequence
  source: /note="Description of Artificial Sequence: Synthetic oligonucleotide"
cacggagcagcagcactcgtc

SEQ ID NO: 31982 - DNA, 21 bp, Artificial Sequence
  source: /note="Description of Artificial Sequence: Synthetic oligonucleotide"
cacggagcaaaactcctcagc

SEQ ID NO: 31983 - DNA, 21 bp, Artificial Sequence
  source: /note="Description of Artificial Sequence: Synthetic oligonucleotide"
cacggagcactcagcgaagca

SEQ ID NO: 31984 - DNA, 21 bp, Artificial Sequence
  source: /note="Description of Artificial Sequence: Synthetic oligonucleotide"
cacggagcaaacagactcaca

SEQ ID NO: 31985 - DNA, 21 bp, Artificial Sequence
  source: /note="Description of Artificial Sequence: Synthetic oligonucleotide"
cacggagacggacacagcaca

SEQ ID NO: 31986 - DNA, 21 bp, Artificial Sequence
  source: /note="Description of Artificial Sequence: Synthetic oligonucleotide"
cacggagacagagcactcatg

SEQ ID NO: 31987 - DNA, 21 bp, Artificial Sequence
  source: /note="Description of Artificial Sequence: Synthetic oligonucleotide"
cacggagacgtcaacagaaca

SEQ ID NO: 31988 - DNA, 21 bp, Artificial Sequence
  source: /note="Description of Artificial Sequence: Synthetic oligonucleotide"
cacggagaaatgatggaaagc

SEQ ID NO: 31989 - DNA, 21 bp, Artificial Sequence
  source: /note="Description of Artificial Sequence: Synthetic oligonucleotide"
cacggattccacacaggaagc

SEQ ID NO: 31990 - DNA, 21 bp, Artificial Sequence
  source: /note="Description of Artificial Sequence: Synthetic oligonucleotide"
cacggattccaaaacgtcgac

SEQ ID NO: 31991 - DNA, 21 bp, Artificial Sequence
  source: /note="Description of Artificial Sequence: Synthetic oligonucleotide"
cacggaggagaagtcacattc

SEQ ID NO: 31992 - DNA, 21 bp, Artificial Sequence
  source: /note="Description of Artificial Sequence: Synthetic oligonucleotide"
cacggaggattcagaggagaa

SEQ ID NO: 31993 - DNA, 21 bp, Artificial Sequence
  source: /note="Description of Artificial Sequence: Synthetic oligonucleotide"
cacggacacttcagcatggca

SEQ ID NO: 31994 - DNA, 21 bp, Artificial Sequence
  source: /note="Description of Artificial Sequence: Synthetic oligonucleotide"
cacggaaaacacgtcttcgtc

SEQ ID NO: 31995 - DNA, 21 bp, Artificial Sequence
  source: /note="Description of Artificial Sequence: Synthetic oligonucleotide"
cacggactcatcgcagtcgca

SEQ ID NO: 31996 - DNA, 21 bp, Artificial Sequence
  source: /note="Description of Artificial Sequence: Synthetic oligonucleotide"
cacggactcaacagcatgcca

SEQ ID NO: 31997 - DNA, 21 bp, Artificial Sequence
  source: /note="Description of Artificial Sequence: Synthetic oligonucleotide"
cacggactcagcgaagactac

SEQ ID NO: 31998 - DNA, 21 bp, Artificial Sequence
  source: /note="Description of Artificial Sequence: Synthetic oligonucleotide"
cacggactcagcctcaaagac

SEQ ID NO: 31999 - DNA, 21 bp, Artificial Sequence
  source: /note="Description of Artificial Sequence: Synthetic oligonucleotide"
cacggaatggaagacggactc

SEQ ID NO: 32000 - DNA, 21 bp, Artificial Sequence
  source: /note="Description of Artificial Sequence: Synthetic oligonucleotide"
cacggaaacctcaactaccac

SEQ ID NO: 32001 - DNA, 21 bp, Artificial Sequence
  source: /note="Description of Artificial Sequence: Synthetic oligonucleotide"
cacggaccaaacgcaagcgac

SEQ ID NO: 32002 - DNA, 21 bp, Artificial Sequence
  source: /note="Description of Artificial Sequence: Synthetic oligonucleotide"
cacggaagagaagtccaccaa

SEQ ID NO: 32003 - DNA, 21 bp, Artificial Sequence
  source: /note="Description of Artificial Sequence: Synthetic oligonucleotide"
cacggaagcggaagctgctgc

SEQ ID NO: 32004 - DNA, 21 bp, Artificial Sequence
  source: /note="Description of Artificial Sequence: Synthetic oligonucleotide"
cacggaagcatcgaaagccaa

SEQ ID NO: 32005 - DNA, 21 bp, Artificial Sequence
  source: /note="Description of Artificial Sequence: Synthetic oligonucleotide"
cacggaagcaaaacaatgagc

SEQ ID NO: 32006 - DNA, 21 bp, Artificial Sequence
  source: /note="Description of Artificial Sequence: Synthetic oligonucleotide"
cacggaagcatgtggccagaa

SEQ ID NO: 32007 - DNA, 21 bp, Artificial Sequence
  source: /note="Description of Artificial Sequence: Synthetic oligonucleotide"
cacggaagcagcacaagaaac

SEQ ID NO: 32008 - DNA, 21 bp, Artificial Sequence
  source: /note="Description of Artificial Sequence: Synthetic oligonucleotide"
cacggaagcacagaaaacagc

SEQ ID NO: 32009 - DNA, 21 bp, Artificial Sequence
  source: /note="Description of Artificial Sequence: Synthetic oligonucleotide"
cacggaagcacaaaactccca

SEQ ID NO: 32010 - DNA, 21 bp, Artificial Sequence
  source: /note="Description of Artificial Sequence: Synthetic oligonucleotide"
cacggaacaggagtcttcgga

SEQ ID NO: 32011 - DNA, 21 bp, Artificial Sequence
  source: /note="Description of Artificial Sequence: Synthetic oligonucleotide"
cacggaacaaacagaacacac

SEQ ID NO: 32012 - DNA, 21 bp, Artificial Sequence
  source: /note="Description of Artificial Sequence: Synthetic oligonucleotide"
cacggaacaagcaaacacagc

SEQ ID NO: 32013 - DNA, 21 bp, Artificial Sequence
  source: /note="Description of Artificial Sequence: Synthetic oligonucleotide"
cacggaacaagcagcagacca

SEQ ID NO: 32014 - DNA, 21 bp, Artificial Sequence
  source: /note="Description of Artificial Sequence: Synthetic oligonucleotide"
cacggagtccaccaccaagtc

SEQ ID NO: 32015 - DNA, 21 bp, Artificial Sequence
  source: /note="Description of Artificial Sequence: Synthetic oligonucleotide"
cacggagtctacccacacctc

SEQ ID NO: 32016 - DNA, 21 bp, Artificial Sequence
  source: /note="Description of Artificial Sequence: Synthetic oligonucleotide"
caccacgcagcaggagcagtc

SEQ ID NO: 32017 - DNA, 21 bp, Artificial Sequence
  source: /note="Description of Artificial Sequence: Synthetic oligonucleotide"
caccacgcaaaagcaaacctc

SEQ ID NO: 32018 - DNA, 21 bp, Artificial Sequence
  source: /note="Description of Artificial Sequence: Synthetic oligonucleotide"
caccacgcactcccaccagac

SEQ ID NO: 32019 - DNA, 21 bp, Artificial Sequence
  source: /note="Description of Artificial Sequence: Synthetic oligonucleotide"
caccacgcaccaaacacacca

SEQ ID NO: 32020 - DNA, 21 bp, Artificial Sequence
  source: /note="Description of Artificial Sequence: Synthetic oligonucleotide"
caccacgcacaaggagaagca

SEQ ID NO: 32021 - DNA, 21 bp, Artificial Sequence
  source: /note="Description of Artificial Sequence: Synthetic oligonucleotide"
caccacgacgacagactccaa

SEQ ID NO: 32022 - DNA, 21 bp, Artificial Sequence
  source: /note="Description of Artificial Sequence: Synthetic oligonucleotide"
caccacgacctcagcatccca

SEQ ID NO: 32023 - DNA, 21 bp, Artificial Sequence
  source: /note="Description of Artificial Sequence: Synthetic oligonucleotide"
caccacgacccaacaacaaga

SEQ ID NO: 32024 - DNA, 21 bp, Artificial Sequence
  source: /note="Description of Artificial Sequence: Synthetic oligonucleotide"
caccacggaacagacagacca

SEQ ID NO: 32025 - DNA, 21 bp, Artificial Sequence
  source: /note="Description of Artificial Sequence: Synthetic oligonucleotide"
caccacctcgcattcctcgac

SEQ ID NO: 32026 - DNA, 21 bp, Artificial Sequence
  source: /note="Description of Artificial Sequence: Synthetic oligonucleotide"
caccacatgagcacagcaagc

SEQ ID NO: 32027 - DNA, 21 bp, Artificial Sequence
  source: /note="Description of Artificial Sequence: Synthetic oligonucleotide"
caccacaacgtcaacagcctc

SEQ ID NO: 32028 - DNA, 21 bp, Artificial Sequence
  source: /note="Description of Artificial Sequence: Synthetic oligonucleotide"
caccacccaagactcgacaca

SEQ ID NO: 32029 - DNA, 21 bp, Artificial Sequence
  source: /note="Description of Artificial Sequence: Synthetic oligonucleotide"
caccacagagtcgaaacagga

SEQ ID NO: 32030 - DNA, 21 bp, Artificial Sequence
  source: /note="Description of Artificial Sequence: Synthetic oligonucleotide"
caccacagcccagcaatcaca

SEQ ID NO: 32031 - DNA, 21 bp, Artificial Sequence
  source: /note="Description of Artificial Sequence: Synthetic oligonucleotide"
caccacacaaacccagaccca

SEQ ID NO: 32032 - DNA, 21 bp, Artificial Sequence
  source: /note="Description of Artificial Sequence: Synthetic oligonucleotide"
cacatcgcactcacaagccca

SEQ ID NO: 32033 - DNA, 21 bp, Artificial Sequence
  source: /note="Description of Artificial Sequence: Synthetic oligonucleotide"
cacatcctcacaagcgcacca

SEQ ID NO: 32034 - DNA, 21 bp, Artificial Sequence
  source: /note="Description of Artificial Sequence: Synthetic oligonucleotide"
cacatcccactcaaacaagca

SEQ ID NO: 32035 - DNA, 21 bp, Artificial Sequence
  source: /note="Description of Artificial Sequence: Synthetic oligonucleotide"
cacatcccaagcagcagcgga

SEQ ID NO: 32036 - DNA, 21 bp, Artificial Sequence
  source: /note="Description of Artificial Sequence: Synthetic oligonucleotide"
cacatcccagtcatgacacca

SEQ ID NO: 32037 - DNA, 21 bp, Artificial Sequence
  source: /note="Description of Artificial Sequence: Synthetic oligonucleotide"
cacatcagacacgacccaaaa

SEQ ID NO: 32038 - DNA, 21 bp, Artificial Sequence
  source: /note="Description of Artificial Sequence: Synthetic oligonucleotide"
cacatcagaacaggaatgcca

SEQ ID NO: 32039 - DNA, 21 bp, Artificial Sequence
  source: /note="Description of Artificial Sequence: Synthetic oligonucleotide"
cacatcagcccaatgccagtc

SEQ ID NO: 32040 - DNA, 21 bp, Artificial Sequence
  source: /note="Description of Artificial Sequence: Synthetic oligonucleotide"
cacatcagcagcagcacagtc

SEQ ID NO: 32041 - DNA, 21 bp, Artificial Sequence
  source: /note="Description of Artificial Sequence: Synthetic oligonucleotide"
cacatcacacaacaactcaca

SEQ ID NO: 32042 - DNA, 21 bp, Artificial Sequence
  source: /note="Description of Artificial Sequence: Synthetic oligonucleotide"
cacaaagcagacagcgtcagc

SEQ ID NO: 32043 - DNA, 21 bp, Artificial Sequence
  source: /note="Description of Artificial Sequence: Synthetic oligonucleotide"
cacaaattcagcagcccactc

SEQ ID NO: 32044 - DNA, 21 bp, Artificial Sequence
  source: /note="Description of Artificial Sequence: Synthetic oligonucleotide"
cacaaaggactcagcccactc

SEQ ID NO: 32045 - DNA, 21 bp, Artificial Sequence
  source: /note="Description of Artificial Sequence: Synthetic oligonucleotide"
cacaaactcggaggaagcttc

SEQ ID NO: 32046 - DNA, 21 bp, Artificial Sequence
  source: /note="Description of Artificial Sequence: Synthetic oligonucleotide"
cacaaactcccaggacaccac

SEQ ID NO: 32047 - DNA, 21 bp, Artificial Sequence
  source: /note="Description of Artificial Sequence: Synthetic oligonucleotide"
cacaaactcacaagcaacgga

SEQ ID NO: 32048 - DNA, 21 bp, Artificial Sequence
  source: /note="Description of Artificial Sequence: Synthetic oligonucleotide"
cacaaaaacatcggagtcgtc

SEQ ID NO: 32049 - DNA, 21 bp, Artificial Sequence
  source: /note="Description of Artificial Sequence: Synthetic oligonucleotide"
cacaaaccaccaatcgtccca

SEQ ID NO: 32050 - DNA, 21 bp, Artificial Sequence
  source: /note="Description of Artificial Sequence: Synthetic oligonucleotide"
cacaaaccacaagtcggagtc

SEQ ID NO: 32051 - DNA, 21 bp, Artificial Sequence
  source: /note="Description of Artificial Sequence: Synthetic oligonucleotide"
cacaaaccaagaccagaagtc

SEQ ID NO: 32052 - DNA, 21 bp, Artificial Sequence
  source: /note="Description of Artificial Sequence: Synthetic oligonucleotide"
cacaaacaaagccaagcagga

SEQ ID NO: 32053 - DNA, 21 bp, Artificial Sequence
  source: /note="Description of Artificial Sequence: Synthetic oligonucleotide"
cacaaacaaacaatggaaaga

SEQ ID NO: 32054 - DNA, 21 bp, Artificial Sequence
  source: /note="Description of Artificial Sequence: Synthetic oligonucleotide"
cacaaaagcagcgacagactc

SEQ ID NO: 32055 - DNA, 21 bp, Artificial Sequence
  source: /note="Description of Artificial Sequence: Synthetic oligonucleotide"
cacaaaagcgtcctcgtccca

SEQ ID NO: 32056 - DNA, 21 bp, Artificial Sequence
  source: /note="Description of Artificial Sequence: Synthetic oligonucleotide"
cacaaaacaagcgtcccaatc

SEQ ID NO: 32057 - DNA, 21 bp, Artificial Sequence
  source: /note="Description of Artificial Sequence: Synthetic oligonucleotide"
cacaaagtcccagcacaaaac

SEQ ID NO: 32058 - DNA, 21 bp, Artificial Sequence
  source: /note="Description of Artificial Sequence: Synthetic oligonucleotide"
cacaaagtcccaggactcgga

SEQ ID NO: 32059 - DNA, 21 bp, Artificial Sequence
  source: /note="Description of Artificial Sequence: Synthetic oligonucleotide"
cacaaatacaacctcggagca

SEQ ID NO: 32060 - DNA, 21 bp, Artificial Sequence
  source: /note="Description of Artificial Sequence: Synthetic oligonucleotide"
cacctcgcagcactcagccac

SEQ ID NO: 32061 - DNA, 21 bp, Artificial Sequence
  source: /note="Description of Artificial Sequence: Synthetic oligonucleotide"
cacctcgcagaagtcagagaa

SEQ ID NO: 32062 - DNA, 21 bp, Artificial Sequence
  source: /note="Description of Artificial Sequence: Synthetic oligonucleotide"
cacctcgcaggaacaggagca

SEQ ID NO: 32063 - DNA, 21 bp, Artificial Sequence
  source: /note="Description of Artificial Sequence: Synthetic oligonucleotide"
cacctcgcactcgcaccaagc

SEQ ID NO: 32064 - DNA, 21 bp, Artificial Sequence
  source: /note="Description of Artificial Sequence: Synthetic oligonucleotide"
cacctcgcaccagcaatcaac

SEQ ID NO: 32065 - DNA, 21 bp, Artificial Sequence
  source: /note="Description of Artificial Sequence: Synthetic oligonucleotide"
cacctcgaactcggaacaaga

SEQ ID NO: 32066 - DNA, 21 bp, Artificial Sequence
  source: /note="Description of Artificial Sequence: Synthetic oligonucleotide"
cacctcgaaagaccactcagc

SEQ ID NO: 32067 - DNA, 21 bp, Artificial Sequence
  source: /note="Description of Artificial Sequence: Synthetic oligonucleotide"
cacctcggaccagacgcaatc

SEQ ID NO: 32068 - DNA, 21 bp, Artificial Sequence
  source: /note="Description of Artificial Sequence: Synthetic oligonucleotide"
cacctcggaagcagcaactgg

SEQ ID NO: 32069 - DNA, 21 bp, Artificial Sequence
  source: /note="Description of Artificial Sequence: Synthetic oligonucleotide"
cacctccacagcgacagcgga

SEQ ID NO: 32070 - DNA, 21 bp, Artificial Sequence
  source: /note="Description of Artificial Sequence: Synthetic oligonucleotide"
cacctccacagccacgaaagc

SEQ ID NO: 32071 - DNA, 21 bp, Artificial Sequence
  source: /note="Description of Artificial Sequence: Synthetic oligonucleotide"
cacctccactacccagtcgca

SEQ ID NO: 32072 - DNA, 21 bp, Artificial Sequence
  source: /note="Description of Artificial Sequence: Synthetic oligonucleotide"
cacctcaacgcaaaattcgca

SEQ ID NO: 32073 - DNA, 21 bp, Artificial Sequence
  source: /note="Description of Artificial Sequence: Synthetic oligonucleotide"
cacctcaacgcaccagcaaca

SEQ ID NO: 32074 - DNA, 21 bp, Artificial Sequence
  source: /note="Description of Artificial Sequence: Synthetic oligonucleotide"
cacctcaacctcgaaggaaga

SEQ ID NO: 32075 - DNA, 21 bp, Artificial Sequence
  source: /note="Description of Artificial Sequence: Synthetic oligonucleotide"
cacctcccagcacacccactc

SEQ ID NO: 32076 - DNA, 21 bp, Artificial Sequence
  source: /note="Description of Artificial Sequence: Synthetic oligonucleotide"
cacctcccaaaaaacccaagc

SEQ ID NO: 32077 - DNA, 21 bp, Artificial Sequence
  source: /note="Description of Artificial Sequence: Synthetic oligonucleotide"
cacctcccaagcggactcaca

SEQ ID NO: 32078 - DNA, 21 bp, Artificial Sequence
  source: /note="Description of Artificial Sequence: Synthetic oligonucleotide"
cacctcccaacaagcgacgca

SEQ ID NO: 32079 - DNA, 21 bp, Artificial Sequence
  source: /note="Description of Artificial Sequence: Synthetic oligonucleotide"
cacctcccatacaacgtccca

SEQ ID NO: 32080 - DNA, 21 bp, Artificial Sequence
  source: /note="Description of Artificial Sequence: Synthetic oligonucleotide"
cacctccaaatcctcgaagca

SEQ ID NO: 32081 - DNA, 21 bp, Artificial Sequence
  source: /note="Description of Artificial Sequence: Synthetic oligonucleotide"
cacctcagagaactcatcagc

SEQ ID NO: 32082 - DNA, 21 bp, Artificial Sequence
  source: /note="Description of Artificial Sequence: Synthetic oligonucleotide"
cacctcagaagcggagtcgga

SEQ ID NO: 32083 - DNA, 21 bp, Artificial Sequence
  source: /note="Description of Artificial Sequence: Synthetic oligonucleotide"
cacctcagcgactggccaatc

SEQ ID NO: 32084 - DNA, 21 bp, Artificial Sequence
  source: /note="Description of Artificial Sequence: Synthetic oligonucleotide"
cacctcagcggaatgcacgca

SEQ ID NO: 32085 - DNA, 21 bp, Artificial Sequence
  source: /note="Description of Artificial Sequence: Synthetic oligonucleotide"
cacctcagcatcgcagcaagc

SEQ ID NO: 32086 - DNA, 21 bp, Artificial Sequence
  source: /note="Description of Artificial Sequence: Synthetic oligonucleotide"
cacctcagcccattcacagac

SEQ ID NO: 32087 - DNA, 21 bp, Artificial Sequence
  source: /note="Description of Artificial Sequence: Synthetic oligonucleotide"
cacctcagcccactcgtcaga

SEQ ID NO: 32088 - DNA, 21 bp, Artificial Sequence
  source: /note="Description of Artificial Sequence: Synthetic oligonucleotide"
cacctcagcccaagaccacca

SEQ ID NO: 32089 - DNA, 21 bp, Artificial Sequence
  source: /note="Description of Artificial Sequence: Synthetic oligonucleotide"
cacctcagcgtcagactcagc

SEQ ID NO: 32090 - DNA, 21 bp, Artificial Sequence
  source: /note="Description of Artificial Sequence: Synthetic oligonucleotide"
cacctcagcgtcagcggaagc

SEQ ID NO: 32091 - DNA, 21 bp, Artificial Sequence
  source: /note="Description of Artificial Sequence: Synthetic oligonucleotide"
cacctcacagcactcacagga

SEQ ID NO: 32092 - DNA, 21 bp, Artificial Sequence
  source: /note="Description of Artificial Sequence: Synthetic oligonucleotide"
cacctcacagacacaagaaga

SEQ ID NO: 32093 - DNA, 21 bp, Artificial Sequence
  source: /note="Description of Artificial Sequence: Synthetic oligonucleotide"
cacctcacaagcggagcagca

SEQ ID NO: 32094 - DNA, 21 bp, Artificial Sequence
  source: /note="Description of Artificial Sequence: Synthetic oligonucleotide"
cacctcacaagcaacagcctc

SEQ ID NO: 32095 - DNA, 21 bp, Artificial Sequence
  source: /note="Description of Artificial Sequence: Synthetic oligonucleotide"
cacctcacaagcagagcagga

SEQ ID NO: 32096 - DNA, 21 bp, Artificial Sequence
  source: /note="Description of Artificial Sequence: Synthetic oligonucleotide"
cacctcgtcagaggagaacca

SEQ ID NO: 32097 - DNA, 21 bp, Artificial Sequence
  source: /note="Description of Artificial Sequence: Synthetic oligonucleotide"
cacctcgtcagcaacagaagc

SEQ ID NO: 32098 - DNA, 21 bp, Artificial Sequence
  source: /note="Description of Artificial Sequence: Synthetic oligonucleotide"
cacctcgtcagcacaacaagc

SEQ ID NO: 32099 - DNA, 21 bp, Artificial Sequence
  source: /note="Description of Artificial Sequence: Synthetic oligonucleotide"
cacctcgtcagcacagtcgca

SEQ ID NO: 32100 - DNA, 21 bp, Artificial Sequence
  source: /note="Description of Artificial Sequence: Synthetic oligonucleotide"
cacatggcaggaggagactac

SEQ ID NO: 32101 - DNA, 21 bp, Artificial Sequence
  source: /note="Description of Artificial Sequence: Synthetic oligonucleotide"
cacatggacagcacaatcagc

SEQ ID NO: 32102 - DNA, 21 bp, Artificial Sequence
  source: /note="Description of Artificial Sequence: Synthetic oligonucleotide"
cacatgggagacatgaacaga

SEQ ID NO: 32103 - DNA, 21 bp, Artificial Sequence
  source: /note="Description of Artificial Sequence: Synthetic oligonucleotide"
cacatgatcatcgtcgacagc

SEQ ID NO: 32104 - DNA, 21 bp, Artificial Sequence
  source: /note="Description of Artificial Sequence: Synthetic oligonucleotide"
cacatgaaaccacaaagcgac

SEQ ID NO: 32105 - DNA, 21 bp, Artificial Sequence
  source: /note="Description of Artificial Sequence: Synthetic oligonucleotide"
cacatgctcacacacacacac

SEQ ID NO: 32106 - DNA, 21 bp, Artificial Sequence
  source: /note="Description of Artificial Sequence: Synthetic oligonucleotide"
cacatgatgaaactcggaagc

SEQ ID NO: 32107 - DNA, 21 bp, Artificial Sequence
  source: /note="Description of Artificial Sequence: Synthetic oligonucleotide"
cacatgatgagccacggacca

SEQ ID NO: 32108 - DNA, 21 bp, Artificial Sequence
  source: /note="Description of Artificial Sequence: Synthetic oligonucleotide"
cacatgaacgcagaccacaaa

SEQ ID NO: 32109 - DNA, 21 bp, Artificial Sequence
  source: /note="Description of Artificial Sequence: Synthetic oligonucleotide"
cacatgaacctcaaagacgca

SEQ ID NO: 32110 - DNA, 21 bp, Artificial Sequence
  source: /note="Description of Artificial Sequence: Synthetic oligonucleotide"
cacatgccagacgacccaagc

SEQ ID NO: 32111 - DNA, 21 bp, Artificial Sequence
  source: /note="Description of Artificial Sequence: Synthetic oligonucleotide"
cacatgccaaacatgtacagc

SEQ ID NO: 32112 - DNA, 21 bp, Artificial Sequence
  source: /note="Description of Artificial Sequence: Synthetic oligonucleotide"
cacatgagcaacccaagcttc

SEQ ID NO: 32113 - DNA, 21 bp, Artificial Sequence
  source: /note="Description of Artificial Sequence: Synthetic oligonucleotide"
cacatgagcgtcctccaaaaa

SEQ ID NO: 32114 - DNA, 21 bp, Artificial Sequence
  source: /note="Description of Artificial Sequence: Synthetic oligonucleotide"
cacatgagcgtcagagaccca

SEQ ID NO: 32115 - DNA, 21 bp, Artificial Sequence
  source: /note="Description of Artificial Sequence: Synthetic oligonucleotide"
cacatgacaggaacaaacctc

SEQ ID NO: 32116 - DNA, 21 bp, Artificial Sequence
  source: /note="Description of Artificial Sequence: Synthetic oligonucleotide"
cacatggtcgcaaacccagca

SEQ ID NO: 32117 - DNA, 21 bp, Artificial Sequence
  source: /note="Description of Artificial Sequence: Synthetic oligonucleotide"
cacaacgcagcacaaaaccaa

SEQ ID NO: 32118 - DNA, 21 bp, Artificial Sequence
  source: /note="Description of Artificial Sequence: Synthetic oligonucleotide"
cacaacgcaggatacatgcca

SEQ ID NO: 32119 - DNA, 21 bp, Artificial Sequence
  source: /note="Description of Artificial Sequence: Synthetic oligonucleotide"
cacaacgcaagcgcagtcaac

SEQ ID NO: 32120 - DNA, 21 bp, Artificial Sequence
  source: /note="Description of Artificial Sequence: Synthetic oligonucleotide"
cacaacgaactcccaccacca

SEQ ID NO: 32121 - DNA, 21 bp, Artificial Sequence
  source: /note="Description of Artificial Sequence: Synthetic oligonucleotide"
cacaacgaaccagacaaagga

SEQ ID NO: 32122 - DNA, 21 bp, Artificial Sequence
  source: /note="Description of Artificial Sequence: Synthetic oligonucleotide"
cacaaccacgacacagtcctc

SEQ ID NO: 32123 - DNA, 21 bp, Artificial Sequence
  source: /note="Description of Artificial Sequence: Synthetic oligonucleotide"
cacaaccacatcgtccacgca

SEQ ID NO: 32124 - DNA, 21 bp, Artificial Sequence
  source: /note="Description of Artificial Sequence: Synthetic oligonucleotide"
cacaacaaaagcagctacgtc

SEQ ID NO: 32125 - DNA, 21 bp, Artificial Sequence
  source: /note="Description of Artificial Sequence: Synthetic oligonucleotide"
cacaacatgagaatcccaagc

SEQ ID NO: 32126 - DNA, 21 bp, Artificial Sequence
  source: /note="Description of Artificial Sequence: Synthetic oligonucleotide"
cacaacaacacagtcaaccaa

SEQ ID NO: 32127 - DNA, 21 bp, Artificial Sequence
  source: /note="Description of Artificial Sequence: Synthetic oligonucleotide"
cacaacccaccaaaactcaca

SEQ ID NO: 32128 - DNA, 21 bp, Artificial Sequence
  source: /note="Description of Artificial Sequence: Synthetic oligonucleotide"
cacaacccaagagaactcgga

SEQ ID NO: 32129 - DNA, 21 bp, Artificial Sequence
  source: /note="Description of Artificial Sequence: Synthetic oligonucleotide"
cacaacccaagcctcagaaca

SEQ ID NO: 32130 - DNA, 21 bp, Artificial Sequence
  source: /note="Description of Artificial Sequence: Synthetic oligonucleotide"
cacaaccaaacactcggaagc

SEQ ID NO: 32131 - DNA, 21 bp, Artificial Sequence
  source: /note="Description of Artificial Sequence: Synthetic oligonucleotide"
cacaacagaaacgacggattc

SEQ ID NO: 32132 - DNA, 21 bp, Artificial Sequence
  source: /note="Description of Artificial Sequence: Synthetic oligonucleotide"
cacaacagccaccactacgca

SEQ ID NO: 32133 - DNA, 21 bp, Artificial Sequence
  source: /note="Description of Artificial Sequence: Synthetic oligonucleotide"
cacaacagccacagcatgaga

SEQ ID NO: 32134 - DNA, 21 bp, Artificial Sequence
  source: /note="Description of Artificial Sequence: Synthetic oligonucleotide"
cacaacagcccaggagtcgga

SEQ ID NO: 32135 - DNA, 21 bp, Artificial Sequence
  source: /note="Description of Artificial Sequence: Synthetic oligonucleotide"
cacaacagcagcttcgacatg

SEQ ID NO: 32136 - DNA, 21 bp, Artificial Sequence
  source: /note="Description of Artificial Sequence: Synthetic oligonucleotide"
cacccagcaatcctccaactc

SEQ ID NO: 32137 - DNA, 21 bp, Artificial Sequence
  source: /note="Description of Artificial Sequence: Synthetic oligonucleotide"
cacccagcaacaaaactcgga

SEQ ID NO: 32138 - DNA, 21 bp, Artificial Sequence
  source: /note="Description of Artificial Sequence: Synthetic oligonucleotide"
cacccagacccacacagcaca

SEQ ID NO: 32139 - DNA, 21 bp, Artificial Sequence
  source: /note="Description of Artificial Sequence: Synthetic oligonucleotide"
cacccagaaaaaagaaaccca

SEQ ID NO: 32140 - DNA, 21 bp, Artificial Sequence
  source: /note="Description of Artificial Sequence: Synthetic oligonucleotide"
cacccagaactcccactccac

SEQ ID NO: 32141 - DNA, 21 bp, Artificial Sequence
  source: /note="Description of Artificial Sequence: Synthetic oligonucleotide"
cacccagaaatgctcgtcaca

SEQ ID NO: 32142 - DNA, 21 bp, Artificial Sequence
  source: /note="Description of Artificial Sequence: Synthetic oligonucleotide"
cacccattcggaacagcaagc

SEQ ID NO: 32143 - DNA, 21 bp, Artificial Sequence
  source: /note="Description of Artificial Sequence: Synthetic oligonucleotide"
cacccaggattcaaccacgac

SEQ ID NO: 32144 - DNA, 21 bp, Artificial Sequence
  source: /note="Description of Artificial Sequence: Synthetic oligonucleotide"
cacccaggaccactcgtcgca

SEQ ID NO: 32145 - DNA, 21 bp, Artificial Sequence
  source: /note="Description of Artificial Sequence: Synthetic oligonucleotide"
cacccaggacaaagcccagtc

SEQ ID NO: 32146 - DNA, 21 bp, Artificial Sequence
  source: /note="Description of Artificial Sequence: Synthetic oligonucleotide"
cacccaggatacagcagcaac

SEQ ID NO: 32147 - DNA, 21 bp, Artificial Sequence
  source: /note="Description of Artificial Sequence: Synthetic oligonucleotide"
cacccaatcatcccaatcagc

SEQ ID NO: 32148 - DNA, 21 bp, Artificial Sequence
  source: /note="Description of Artificial Sequence: Synthetic oligonucleotide"
cacccaatcaacacaagaagc

SEQ ID NO: 32149 - DNA, 21 bp, Artificial Sequence
  source: /note="Description of Artificial Sequence: Synthetic oligonucleotide"
cacccaatcccattcccagga

SEQ ID NO: 32150 - DNA, 21 bp, Artificial Sequence
  source: /note="Description of Artificial Sequence: Synthetic oligonucleotide"
cacccaaaaggagaaccacca

SEQ ID NO: 32151 - DNA, 21 bp, Artificial Sequence
  source: /note="Description of Artificial Sequence: Synthetic oligonucleotide"
cacccaaaactcgtcagcgtc

SEQ ID NO: 32152 - DNA, 21 bp, Artificial Sequence
  source: /note="Description of Artificial Sequence: Synthetic oligonucleotide"
cacccactcgaagaccaactc

SEQ ID NO: 32153 - DNA, 21 bp, Artificial Sequence
  source: /note="Description of Artificial Sequence: Synthetic oligonucleotide"
cacccactcaacgcaagacca

SEQ ID NO: 32154 - DNA, 21 bp, Artificial Sequence
  source: /note="Description of Artificial Sequence: Synthetic oligonucleotide"
cacccaatgacaagcaacagc

SEQ ID NO: 32155 - DNA, 21 bp, Artificial Sequence
  source: /note="Description of Artificial Sequence: Synthetic oligonucleotide"
cacccaccaaaatacgtcaca

SEQ ID NO: 32156 - DNA, 21 bp, Artificial Sequence
  source: /note="Description of Artificial Sequence: Synthetic oligonucleotide"
cacccaccaccaagccacatg

SEQ ID NO: 32157 - DNA, 21 bp, Artificial Sequence
  source: /note="Description of Artificial Sequence: Synthetic oligonucleotide"
cacccaccaccaacagacagc

SEQ ID NO: 32158 - DNA, 21 bp, Artificial Sequence
  source: /note="Description of Artificial Sequence: Synthetic oligonucleotide"
cacccaccaagaacaccagca

SEQ ID NO: 32159 - DNA, 21 bp, Artificial Sequence
  source: /note="Description of Artificial Sequence: Synthetic oligonucleotide"
cacccacaaagacaagcaagc

SEQ ID NO: 32160 - DNA, 21 bp, Artificial Sequence
  source: /note="Description of Artificial Sequence: Synthetic oligonucleotide"
cacccacaaagcagccactgg

SEQ ID NO: 32161 - DNA, 21 bp, Artificial Sequence
  source: /note="Description of Artificial Sequence: Synthetic oligonucleotide"
cacccaagcttcagcccactc

SEQ ID NO: 32162 - DNA, 21 bp, Artificial Sequence
  source: /note="Description of Artificial Sequence: Synthetic oligonucleotide"
cacccaagcggatacagcaac

SEQ ID NO: 32163 - DNA, 21 bp, Artificial Sequence
  source: /note="Description of Artificial Sequence: Synthetic oligonucleotide"
cacccaagcatcgcaggaatg

SEQ ID NO: 32164 - DNA, 21 bp, Artificial Sequence
  source: /note="Description of Artificial Sequence: Synthetic oligonucleotide"
cacccaagcatcgtcagagac

SEQ ID NO: 32165 - DNA, 21 bp, Artificial Sequence
  source: /note="Description of Artificial Sequence: Synthetic oligonucleotide"
cacccaagcctcgcaatcgga

SEQ ID NO: 32166 - DNA, 21 bp, Artificial Sequence
  source: /note="Description of Artificial Sequence: Synthetic oligonucleotide"
cacccaagcagagtcatcatg

SEQ ID NO: 32167 - DNA, 21 bp, Artificial Sequence
  source: /note="Description of Artificial Sequence: Synthetic oligonucleotide"
cacccaagcagccaactccac

SEQ ID NO: 32168 - DNA, 21 bp, Artificial Sequence
  source: /note="Description of Artificial Sequence: Synthetic oligonucleotide"
cacccaagctacagcagcgga

SEQ ID NO: 32169 - DNA, 21 bp, Artificial Sequence
  source: /note="Description of Artificial Sequence: Synthetic oligonucleotide"
cacccaacagcaaaactccca

SEQ ID NO: 32170 - DNA, 21 bp, Artificial Sequence
  source: /note="Description of Artificial Sequence: Synthetic oligonucleotide"
cacccaacagaaacaacagaa

SEQ ID NO: 32171 - DNA, 21 bp, Artificial Sequence
  source: /note="Description of Artificial Sequence: Synthetic oligonucleotide"
cacccaacaggaacaaaagac

SEQ ID NO: 32172 - DNA, 21 bp, Artificial Sequence
  source: /note="Description of Artificial Sequence: Synthetic oligonucleotide"
cacccaacactcagccactac

SEQ ID NO: 32173 - DNA, 21 bp, Artificial Sequence
  source: /note="Description of Artificial Sequence: Synthetic oligonucleotide"
cacccaacaaacaacagcaac

SEQ ID NO: 32174 - DNA, 21 bp, Artificial Sequence
  source: /note="Description of Artificial Sequence: Synthetic oligonucleotide"
cacccaacaagcatcatcctc

SEQ ID NO: 32175 - DNA, 21 bp, Artificial Sequence
  source: /note="Description of Artificial Sequence: Synthetic oligonucleotide"
cacccaacaacaagattcgga

SEQ ID NO: 32176 - DNA, 21 bp, Artificial Sequence
  source: /note="Description of Artificial Sequence: Synthetic oligonucleotide"
cacccagtcagcagcagacaa

SEQ ID NO: 32177 - DNA, 21 bp, Artificial Sequence
  source: /note="Description of Artificial Sequence: Synthetic oligonucleotide"
cacccataccaaaacagcctc

SEQ ID NO: 32178 - DNA, 21 bp, Artificial Sequence
  source: /note="Description of Artificial Sequence: Synthetic oligonucleotide"
caccaagcagaagcatacagc

SEQ ID NO: 32179 - DNA, 21 bp, Artificial Sequence
  source: /note="Description of Artificial Sequence: Synthetic oligonucleotide"
caccaagcaccaggactccaa

SEQ ID NO: 32180 - DNA, 21 bp, Artificial Sequence
  source: /note="Description of Artificial Sequence: Synthetic oligonucleotide"
caccaagacatcgcacacctc

SEQ ID NO: 32181 - DNA, 21 bp, Artificial Sequence
  source: /note="Description of Artificial Sequence: Synthetic oligonucleotide"
caccaattcaacagagaacca

SEQ ID NO: 32182 - DNA, 21 bp, Artificial Sequence
  source: /note="Description of Artificial Sequence: Synthetic oligonucleotide"
caccaaggagaccaaaacatc

SEQ ID NO: 32183 - DNA, 21 bp, Artificial Sequence
  source: /note="Description of Artificial Sequence: Synthetic oligonucleotide"
caccaaggacacccaagagac

SEQ ID NO: 32184 - DNA, 21 bp, Artificial Sequence
  source: /note="Description of Artificial Sequence: Synthetic oligonucleotide"
caccaaggaagcccaacattc

SEQ ID NO: 32185 - DNA, 21 bp, Artificial Sequence
  source: /note="Description of Artificial Sequence: Synthetic oligonucleotide"
caccaactcggaagccaaatg

SEQ ID NO: 32186 - DNA, 21 bp, Artificial Sequence
  source: /note="Description of Artificial Sequence: Synthetic oligonucleotide"
caccaaccacacatcgtccaa

SEQ ID NO: 32187 - DNA, 21 bp, Artificial Sequence
  source: /note="Description of Artificial Sequence: Synthetic oligonucleotide"
caccaaccacacagcagcctc

SEQ ID NO: 32188 - DNA, 21 bp, Artificial Sequence
  source: /note="Description of Artificial Sequence: Synthetic oligonucleotide"
caccaacaaagcacaaacaac

SEQ ID NO: 32189 - DNA, 21 bp, Artificial Sequence
  source: /note="Description of Artificial Sequence: Synthetic oligonucleotide"
caccaaagaacagtcggagtc

SEQ ID NO: 32190 - DNA, 21 bp, Artificial Sequence
  source: /note="Description of Artificial Sequence: Synthetic oligonucleotide"
caccaaagcccaagcgacaga

SEQ ID NO: 32191 - DNA, 21 bp, Artificial Sequence
  source: /note="Description of Artificial Sequence: Synthetic oligonucleotide"
caccaaacagcaagcgtcctc

SEQ ID NO: 32192 - DNA, 21 bp, Artificial Sequence
  source: /note="Description of Artificial Sequence: Synthetic oligonucleotide"
caccaaacagtcggacaaaac

SEQ ID NO: 32193 - DNA, 21 bp, Artificial Sequence
  source: /note="Description of Artificial Sequence: Synthetic oligonucleotide"
cacagagcaagctacgtcgac

SEQ ID NO: 32194 - DNA, 21 bp, Artificial Sequence
  source: /note="Description of Artificial Sequence: Synthetic oligonucleotide"
cacagagacgcactccaacaa

SEQ ID NO: 32195 - DNA, 21 bp, Artificial Sequence
  source: /note="Description of Artificial Sequence: Synthetic oligonucleotide"
cacagagacatcagcacagga

SEQ ID NO: 32196 - DNA, 21 bp, Artificial Sequence
  source: /note="Description of Artificial Sequence: Synthetic oligonucleotide"
cacagagaagaaaaagcaagc

SEQ ID NO: 32197 - DNA, 21 bp, Artificial Sequence
  source: /note="Description of Artificial Sequence: Synthetic oligonucleotide"
cacagagaaggactcgaacac

SEQ ID NO: 32198 - DNA, 21 bp, Artificial Sequence
  source: /note="Description of Artificial Sequence: Synthetic oligonucleotide"
cacagagaacacggataccca

SEQ ID NO: 32199 - DNA, 21 bp, Artificial Sequence
  source: /note="Description of Artificial Sequence: Synthetic oligonucleotide"
cacagagaaaacaaagtcgca

SEQ ID NO: 32200 - DNA, 21 bp, Artificial Sequence
  source: /note="Description of Artificial Sequence: Synthetic oligonucleotide"
cacagaatcggagacgtccca

SEQ ID NO: 32201 - DNA, 21 bp, Artificial Sequence
  source: /note="Description of Artificial Sequence: Synthetic oligonucleotide"
cacagactcccaaacgtcgca

SEQ ID NO: 32202 - DNA, 21 bp, Artificial Sequence
  source: /note="Description of Artificial Sequence: Synthetic oligonucleotide"
cacagaccagaaatgctcagc

SEQ ID NO: 32203 - DNA, 21 bp, Artificial Sequence
  source: /note="Description of Artificial Sequence: Synthetic oligonucleotide"
cacagaccaatcgcaacatac

SEQ ID NO: 32204 - DNA, 21 bp, Artificial Sequence
  source: /note="Description of Artificial Sequence: Synthetic oligonucleotide"
cacagaacaggactcccagaa

SEQ ID NO: 32205 - DNA, 21 bp, Artificial Sequence
  source: /note="Description of Artificial Sequence: Synthetic oligonucleotide"
cacagaacaagcatgccactc

SEQ ID NO: 32206 - DNA, 21 bp, Artificial Sequence
  source: /note="Description of Artificial Sequence: Synthetic oligonucleotide"
cacagaacaacaaacaacttc

SEQ ID NO: 32207 - DNA, 21 bp, Artificial Sequence
  source: /note="Description of Artificial Sequence: Synthetic oligonucleotide"
cacagagtcggaggactcagc

SEQ ID NO: 32208 - DNA, 21 bp, Artificial Sequence
  source: /note="Description of Artificial Sequence: Synthetic oligonucleotide"
cacagagtcgtcgcaatccca

SEQ ID NO: 32209 - DNA, 21 bp, Artificial Sequence
  source: /note="Description of Artificial Sequence: Synthetic oligonucleotide"
cacagcgcagcactctgcatg

SEQ ID NO: 32210 - DNA, 21 bp, Artificial Sequence
  source: /note="Description of Artificial Sequence: Synthetic oligonucleotide"
cacagcgcagcaatgccaagc

SEQ ID NO: 32211 - DNA, 21 bp, Artificial Sequence
  source: /note="Description of Artificial Sequence: Synthetic oligonucleotide"
cacagcgcaggaacagaaaca

SEQ ID NO: 32212 - DNA, 21 bp, Artificial Sequence
  source: /note="Description of Artificial Sequence: Synthetic oligonucleotide"
cacagcgcaaaaatgagcgga

SEQ ID NO: 32213 - DNA, 21 bp, Artificial Sequence
  source: /note="Description of Artificial Sequence: Synthetic oligonucleotide"
cacagcgcaaaaagcatgcac

SEQ ID NO: 32214 - DNA, 21 bp, Artificial Sequence
  source: /note="Description of Artificial Sequence: Synthetic oligonucleotide"
cacagcgcactcctccacatg

SEQ ID NO: 32215 - DNA, 21 bp, Artificial Sequence
  source: /note="Description of Artificial Sequence: Synthetic oligonucleotide"
cacagcgcacaaatcacaatc

SEQ ID NO: 32216 - DNA, 21 bp, Artificial Sequence
  source: /note="Description of Artificial Sequence: Synthetic oligonucleotide"
cacagcgcaacaatgtgcagc

SEQ ID NO: 32217 - DNA, 21 bp, Artificial Sequence
  source: /note="Description of Artificial Sequence: Synthetic oligonucleotide"
cacagcgacagaagcagcgca

SEQ ID NO: 32218 - DNA, 21 bp, Artificial Sequence
  source: /note="Description of Artificial Sequence: Synthetic oligonucleotide"
cacagcgaaaaaagcggattc

SEQ ID NO: 32219 - DNA, 21 bp, Artificial Sequence
  source: /note="Description of Artificial Sequence: Synthetic oligonucleotide"
cacagcgaatacccaacaaaa

SEQ ID NO: 32220 - DNA, 21 bp, Artificial Sequence
  source: /note="Description of Artificial Sequence: Synthetic oligonucleotide"
cacagcttcctcgacctcgaa

SEQ ID NO: 32221 - DNA, 21 bp, Artificial Sequence
  source: /note="Description of Artificial Sequence: Synthetic oligonucleotide"
cacagcttcagcatgatggaa

SEQ ID NO: 32222 - DNA, 21 bp, Artificial Sequence
  source: /note="Description of Artificial Sequence: Synthetic oligonucleotide"
cacagcggacacagccaagga

SEQ ID NO: 32223 - DNA, 21 bp, Artificial Sequence
  source: /note="Description of Artificial Sequence: Synthetic oligonucleotide"
cacagcggaaaaatcctccac

SEQ ID NO: 32224 - DNA, 21 bp, Artificial Sequence
  source: /note="Description of Artificial Sequence: Synthetic oligonucleotide"
cacagcggaagagcatacagc

SEQ ID NO: 32225 - DNA, 21 bp, Artificial Sequence
  source: /note="Description of Artificial Sequence: Synthetic oligonucleotide"
cacagcggaagcagcgaaaca

SEQ ID NO: 32226 - DNA, 21 bp, Artificial Sequence
  source: /note="Description of Artificial Sequence: Synthetic oligonucleotide"
cacagccacggagtcccaagc

SEQ ID NO: 32227 - DNA, 21 bp, Artificial Sequence
  source: /note="Description of Artificial Sequence: Synthetic oligonucleotide"
cacagccacgtcaacagcagc

SEQ ID NO: 32228 - DNA, 21 bp, Artificial Sequence
  source: /note="Description of Artificial Sequence: Synthetic oligonucleotide"
cacagcatccacagcagagaa

SEQ ID NO: 32229 - DNA, 21 bp, Artificial Sequence
  source: /note="Description of Artificial Sequence: Synthetic oligonucleotide"
cacagcatccaacacatccca

SEQ ID NO: 32230 - DNA, 21 bp, Artificial Sequence
  source: /note="Description of Artificial Sequence: Synthetic oligonucleotide"
cacagcaaagcaagcgtcatc

SEQ ID NO: 32231 - DNA, 21 bp, Artificial Sequence
  source: /note="Description of Artificial Sequence: Synthetic oligonucleotide"
cacagcaaaccagcacaaatc

SEQ ID NO: 32232 - DNA, 21 bp, Artificial Sequence
  source: /note="Description of Artificial Sequence: Synthetic oligonucleotide"
cacagcaaaagcgtcgtcaca

SEQ ID NO: 32233 - DNA, 21 bp, Artificial Sequence
  source: /note="Description of Artificial Sequence: Synthetic oligonucleotide"
cacagcctcggagcaatccca

SEQ ID NO: 32234 - DNA, 21 bp, Artificial Sequence
  source: /note="Description of Artificial Sequence: Synthetic oligonucleotide"
cacagcctcggaacaagcgga

SEQ ID NO: 32235 - DNA, 21 bp, Artificial Sequence
  source: /note="Description of Artificial Sequence: Synthetic oligonucleotide"
cacagcctcctcaacagcaca

SEQ ID NO: 32236 - DNA, 21 bp, Artificial Sequence
  source: /note="Description of Artificial Sequence: Synthetic oligonucleotide"
cacagcctcccaggactcaaa

SEQ ID NO: 32237 - DNA, 21 bp, Artificial Sequence
  source: /note="Description of Artificial Sequence: Synthetic oligonucleotide"
cacagcctcagaacaccacaa

SEQ ID NO: 32238 - DNA, 21 bp, Artificial Sequence
  source: /note="Description of Artificial Sequence: Synthetic oligonucleotide"
cacagcatggaagaagcactc

SEQ ID NO: 32239 - DNA, 21 bp, Artificial Sequence
  source: /note="Description of Artificial Sequence: Synthetic oligonucleotide"
cacagcatgccagaccaaatc

SEQ ID NO: 32240 - DNA, 21 bp, Artificial Sequence
  source: /note="Description of Artificial Sequence: Synthetic oligonucleotide"
cacagcatgagcgaagcaaaa

SEQ ID NO: 32241 - DNA, 21 bp, Artificial Sequence
  source: /note="Description of Artificial Sequence: Synthetic oligonucleotide"
cacagcaacaaacaaccaaac

SEQ ID NO: 32242 - DNA, 21 bp, Artificial Sequence
  source: /note="Description of Artificial Sequence: Synthetic oligonucleotide"
cacagcaacaaaacaagcctc

SEQ ID NO: 32243 - DNA, 21 bp, Artificial Sequence
  source: /note="Description of Artificial Sequence: Synthetic oligonucleotide"
cacagcaacctcagagcaatg

SEQ ID NO: 32244 - DNA, 21 bp, Artificial Sequence
  source: /note="Description of Artificial Sequence: Synthetic oligonucleotide"
cacagcaacacaatcagcagc

SEQ ID NO: 32245 - DNA, 21 bp, Artificial Sequence
  source: /note="Description of Artificial Sequence: Synthetic oligonucleotide"
cacagcccagcaagaacagca

SEQ ID NO: 32246 - DNA, 21 bp, Artificial Sequence
  source: /note="Description of Artificial Sequence: Synthetic oligonucleotide"
cacagcccagcaagcccacca

SEQ ID NO: 32247 - DNA, 21 bp, Artificial Sequence
  source: /note="Description of Artificial Sequence: Synthetic oligonucleotide"
cacagcccaggacaaatcagc

SEQ ID NO: 32248 - DNA, 21 bp, Artificial Sequence
  source: /note="Description of Artificial Sequence: Synthetic oligonucleotide"
cacagcccaatggcagtccca

SEQ ID NO: 32249 - DNA, 21 bp, Artificial Sequence
  source: /note="Description of Artificial Sequence: Synthetic oligonucleotide"
cacagcccaaacggatacgca

SEQ ID NO: 32250 - DNA, 21 bp, Artificial Sequence
  source: /note="Description of Artificial Sequence: Synthetic oligonucleotide"
cacagccaagcacaaatgagc

SEQ ID NO: 32251 - DNA, 21 bp, Artificial Sequence
  source: /note="Description of Artificial Sequence: Synthetic oligonucleotide"
cacagccaaaaccaatacagc

SEQ ID NO: 32252 - DNA, 21 bp, Artificial Sequence
  source: /note="Description of Artificial Sequence: Synthetic oligonucleotide"
cacagccaaagagcagtccca

SEQ ID NO: 32253 - DNA, 21 bp, Artificial Sequence
  source: /note="Description of Artificial Sequence: Synthetic oligonucleotide"
cacagcagagcaagcccagaa

SEQ ID NO: 32254 - DNA, 21 bp, Artificial Sequence
  source: /note="Description of Artificial Sequence: Synthetic oligonucleotide"
cacagcagagacaacagaaac

SEQ ID NO: 32255 - DNA, 21 bp, Artificial Sequence
  source: /note="Description of Artificial Sequence: Synthetic oligonucleotide"
cacagcagagaactcagccca

SEQ ID NO: 32256 - DNA, 21 bp, Artificial Sequence
  source: /note="Description of Artificial Sequence: Synthetic oligonucleotide"
cacagcagaggaacaatgctc

SEQ ID NO: 32257 - DNA, 21 bp, Artificial Sequence
  source: /note="Description of Artificial Sequence: Synthetic oligonucleotide"
cacagcagacacgacatgctc

SEQ ID NO: 32258 - DNA, 21 bp, Artificial Sequence
  source: /note="Description of Artificial Sequence: Synthetic oligonucleotide"
cacagcagaccacaaccacaa

SEQ ID NO: 32259 - DNA, 21 bp, Artificial Sequence
  source: /note="Description of Artificial Sequence: Synthetic oligonucleotide"
cacagcagaccaagcggatgc

SEQ ID NO: 32260 - DNA, 21 bp, Artificial Sequence
  source: /note="Description of Artificial Sequence: Synthetic oligonucleotide"
cacagcagaagcacattcgca

SEQ ID NO: 32261 - DNA, 21 bp, Artificial Sequence
  source: /note="Description of Artificial Sequence: Synthetic oligonucleotide"
cacagcagcatcccaggacca

SEQ ID NO: 32262 - DNA, 21 bp, Artificial Sequence
  source: /note="Description of Artificial Sequence: Synthetic oligonucleotide"
cacagcagcatggcaacaatg

SEQ ID NO: 32263 - DNA, 21 bp, Artificial Sequence
  source: /note="Description of Artificial Sequence: Synthetic oligonucleotide"
cacagcagcaacctcggagtc

SEQ ID NO: 32264 - DNA, 21 bp, Artificial Sequence
  source: /note="Description of Artificial Sequence: Synthetic oligonucleotide"
cacagcagcagcgtcaaccca

SEQ ID NO: 32265 - DNA, 21 bp, Artificial Sequence
  source: /note="Description of Artificial Sequence: Synthetic oligonucleotide"
cacagcagcacaggagcaaac

SEQ ID NO: 32266 - DNA, 21 bp, Artificial Sequence
  source: /note="Description of Artificial Sequence: Synthetic oligonucleotide"
cacagcagcgtcccaggagca

SEQ ID NO: 32267 - DNA, 21 bp, Artificial Sequence
  source: /note="Description of Artificial Sequence: Synthetic oligonucleotide"
cacagcacagacagcctccca

SEQ ID NO: 32268 - DNA, 21 bp, Artificial Sequence
  source: /note="Description of Artificial Sequence: Synthetic oligonucleotide"
cacagcacacacagagaactc

SEQ ID NO: 32269 - DNA, 21 bp, Artificial Sequence
  source: /note="Description of Artificial Sequence: Synthetic oligonucleotide"
cacagcacactcatcagccac

SEQ ID NO: 32270 - DNA, 21 bp, Artificial Sequence
  source: /note="Description of Artificial Sequence: Synthetic oligonucleotide"
cacagcacaccactcaacagc

SEQ ID NO: 32271 - DNA, 21 bp, Artificial Sequence
  source: /note="Description of Artificial Sequence: Synthetic oligonucleotide"
cacagcacaagagaaggattc

SEQ ID NO: 32272 - DNA, 21 bp, Artificial Sequence
  source: /note="Description of Artificial Sequence: Synthetic oligonucleotide"
cacagcacaacagacccactc

SEQ ID NO: 32273 - DNA, 21 bp, Artificial Sequence
  source: /note="Description of Artificial Sequence: Synthetic oligonucleotide"
cacagcgtcgcaagcgtcaca

SEQ ID NO: 32274 - DNA, 21 bp, Artificial Sequence
  source: /note="Description of Artificial Sequence: Synthetic oligonucleotide"
cacagcgtcgacagcagagga

SEQ ID NO: 32275 - DNA, 21 bp, Artificial Sequence
  source: /note="Description of Artificial Sequence: Synthetic oligonucleotide"
cacagcgtcgaaagagaccac

SEQ ID NO: 32276 - DNA, 21 bp, Artificial Sequence
  source: /note="Description of Artificial Sequence: Synthetic oligonucleotide"
cacagctacgtcgacagcttc

SEQ ID NO: 32277 - DNA, 21 bp, Artificial Sequence
  source: /note="Description of Artificial Sequence: Synthetic oligonucleotide"
cacacagcaggagacgcagaa

SEQ ID NO: 32278 - DNA, 21 bp, Artificial Sequence
  source: /note="Description of Artificial Sequence: Synthetic oligonucleotide"
cacacagcactcctcagcaac

SEQ ID NO: 32279 - DNA, 21 bp, Artificial Sequence
  source: /note="Description of Artificial Sequence: Synthetic oligonucleotide"
cacacagcaagaacaacacca

SEQ ID NO: 32280 - DNA, 21 bp, Artificial Sequence
  source: /note="Description of Artificial Sequence: Synthetic oligonucleotide"
cacacagcaagcctcccagca

SEQ ID NO: 32281 - DNA, 21 bp, Artificial Sequence
  source: /note="Description of Artificial Sequence: Synthetic oligonucleotide"
cacacagacagatacgcagtc

SEQ ID NO: 32282 - DNA, 21 bp, Artificial Sequence
  source: /note="Description of Artificial Sequence: Synthetic oligonucleotide"
cacacagaagcaggaagagtc

SEQ ID NO: 32283 - DNA, 21 bp, Artificial Sequence
  source: /note="Description of Artificial Sequence: Synthetic oligonucleotide"
cacacagaaacattcggagaa

SEQ ID NO: 32284 - DNA, 21 bp, Artificial Sequence
  source: /note="Description of Artificial Sequence: Synthetic oligonucleotide"
cacacaggactcgtcagagga

SEQ ID NO: 32285 - DNA, 21 bp, Artificial Sequence
  source: /note="Description of Artificial Sequence: Synthetic oligonucleotide"
cacacaggaagcctcagcagc

SEQ ID NO: 32286 - DNA, 21 bp, Artificial Sequence
  source: /note="Description of Artificial Sequence: Synthetic oligonucleotide"
cacacacacctcgcaagcctc

SEQ ID NO: 32287 - DNA, 21 bp, Artificial Sequence
  source: /note="Description of Artificial Sequence: Synthetic oligonucleotide"
cacacaatcaaagacgcatac

SEQ ID NO: 32288 - DNA, 21 bp, Artificial Sequence
  source: /note="Description of Artificial Sequence: Synthetic oligonucleotide"
cacacaaaaagcccacaccca

SEQ ID NO: 32289 - DNA, 21 bp, Artificial Sequence
  source: /note="Description of Artificial Sequence: Synthetic oligonucleotide"
cacacactcaaaccagacgtc

SEQ ID NO: 32290 - DNA, 21 bp, Artificial Sequence
  source: /note="Description of Artificial Sequence: Synthetic oligonucleotide"
cacacactcccaagcacaagc

SEQ ID NO: 32291 - DNA, 21 bp, Artificial Sequence
  source: /note="Description of Artificial Sequence: Synthetic oligonucleotide"
cacacactcccaacaacagca

SEQ ID NO: 32292 - DNA, 21 bp, Artificial Sequence
  source: /note="Description of Artificial Sequence: Synthetic oligonucleotide"
cacacaatggcaagcggaagc

SEQ ID NO: 32293 - DNA, 21 bp, Artificial Sequence
  source: /note="Description of Artificial Sequence: Synthetic oligonucleotide"
cacacaaacagcaacacagga

SEQ ID NO: 32294 - DNA, 21 bp, Artificial Sequence
  source: /note="Description of Artificial Sequence: Synthetic oligonucleotide"
cacacaccagcagtcaacttc

SEQ ID NO: 32295 - DNA, 21 bp, Artificial Sequence
  source: /note="Description of Artificial Sequence: Synthetic oligonucleotide"
cacacaccaggactccacaca

SEQ ID NO: 32296 - DNA, 21 bp, Artificial Sequence
  source: /note="Description of Artificial Sequence: Synthetic oligonucleotide"
cacacaccactcacaagccac

SEQ ID NO: 32297 - DNA, 21 bp, Artificial Sequence
  source: /note="Description of Artificial Sequence: Synthetic oligonucleotide"
cacacaccaaacatcctctac

SEQ ID NO: 32298 - DNA, 21 bp, Artificial Sequence
  source: /note="Description of Artificial Sequence: Synthetic oligonucleotide"
cacacaccacaaccaaacgca

SEQ ID NO: 32299 - DNA, 21 bp, Artificial Sequence
  source: /note="Description of Artificial Sequence: Synthetic oligonucleotide"
cacacacaactcagaacacca

SEQ ID NO: 32300 - DNA, 21 bp, Artificial Sequence
  source: /note="Description of Artificial Sequence: Synthetic oligonucleotide"
cacacacaaagactcagcagc

SEQ ID NO: 32301 - DNA, 21 bp, Artificial Sequence
  source: /note="Description of Artificial Sequence: Synthetic oligonucleotide"
cacacacaagtcacaagatgc

SEQ ID NO: 32302 - DNA, 21 bp, Artificial Sequence
  source: /note="Description of Artificial Sequence: Synthetic oligonucleotide"
cacacaagagacagcgaccca

SEQ ID NO: 32303 - DNA, 21 bp, Artificial Sequence
  source: /note="Description of Artificial Sequence: Synthetic oligonucleotide"
cacacaagaggaaaagcagaa

SEQ ID NO: 32304 - DNA, 21 bp, Artificial Sequence
  source: /note="Description of Artificial Sequence: Synthetic oligonucleotide"
cacacaagcggagaaagctac

SEQ ID NO: 32305 - DNA, 21 bp, Artificial Sequence
  source: /note="Description of Artificial Sequence: Synthetic oligonucleotide"
cacacaagccaccaactccca

SEQ ID NO: 32306 - DNA, 21 bp, Artificial Sequence
  source: /note="Description of Artificial Sequence: Synthetic oligonucleotide"
cacacaagcatcgactacgtc

SEQ ID NO: 32307 - DNA, 21 bp, Artificial Sequence
  source: /note="Description of Artificial Sequence: Synthetic oligonucleotide"
cacacaagcaaaagcgcactc

SEQ ID NO: 32308 - DNA, 21 bp, Artificial Sequence
  source: /note="Description of Artificial Sequence: Synthetic oligonucleotide"
cacacaagcccaccaatcagc

SEQ ID NO: 32309 - DNA, 21 bp, Artificial Sequence
  source: /note="Description of Artificial Sequence: Synthetic oligonucleotide"
cacacaagcccagtctacgac

SEQ ID NO: 32310 - DNA, 21 bp, Artificial Sequence
  source: /note="Description of Artificial Sequence: Synthetic oligonucleotide"
cacacaagccaacaaagacaa

SEQ ID NO: 32311 - DNA, 21 bp, Artificial Sequence
  source: /note="Description of Artificial Sequence: Synthetic oligonucleotide"
cacacaagcacaacaaaatgg

SEQ ID NO: 32312 - DNA, 21 bp, Artificial Sequence
  source: /note="Description of Artificial Sequence: Synthetic oligonucleotide"
cacacaagctgggacggactc

SEQ ID NO: 32313 - DNA, 21 bp, Artificial Sequence
  source: /note="Description of Artificial Sequence: Synthetic oligonucleotide"
cacacaacagcagcaccacca

SEQ ID NO: 32314 - DNA, 21 bp, Artificial Sequence
  source: /note="Description of Artificial Sequence: Synthetic oligonucleotide"
cacacaacaaaagtcgaccca

SEQ ID NO: 32315 - DNA, 21 bp, Artificial Sequence
  source: /note="Description of Artificial Sequence: Synthetic oligonucleotide"
cacacaacaccaacacacaca

SEQ ID NO: 32316 - DNA, 21 bp, Artificial Sequence
  source: /note="Description of Artificial Sequence: Synthetic oligonucleotide"
cacacaacacaatgcacaatg

SEQ ID NO: 32317 - DNA, 21 bp, Artificial Sequence
  source: /note="Description of Artificial Sequence: Synthetic oligonucleotide"
cacacaacaacaatccacgga

SEQ ID NO: 32318 - DNA, 21 bp, Artificial Sequence
  source: /note="Description of Artificial Sequence: Synthetic oligonucleotide"
cacacagtcagaagcggactc

SEQ ID NO: 32319 - DNA, 21 bp, Artificial Sequence
  source: /note="Description of Artificial Sequence: Synthetic oligonucleotide"
cacacagtcacaagcgcagga

SEQ ID NO: 32320 - DNA, 21 bp, Artificial Sequence
  source: /note="Description of Artificial Sequence: Synthetic oligonucleotide"
cacacagtcgtccaaagcagc

SEQ ID NO: 32321 - DNA, 21 bp, Artificial Sequence
  source: /note="Description of Artificial Sequence: Synthetic oligonucleotide"
cacacatacagcagcgaagac

SEQ ID NO: 32322 - DNA, 21 bp, Artificial Sequence
  source: /note="Description of Artificial Sequence: Synthetic oligonucleotide"
cacgtcgacagaagcggagca

SEQ ID NO: 32323 - DNA, 21 bp, Artificial Sequence
  source: /note="Description of Artificial Sequence: Synthetic oligonucleotide"
cacgtcgacagaacacaattc

SEQ ID NO: 32324 - DNA, 21 bp, Artificial Sequence
  source: /note="Description of Artificial Sequence: Synthetic oligonucleotide"
cacgtcggaatcacaagcgca

SEQ ID NO: 32325 - DNA, 21 bp, Artificial Sequence
  source: /note="Description of Artificial Sequence: Synthetic oligonucleotide"
cacgtcggatacggaccaagc

SEQ ID NO: 32326 - DNA, 21 bp, Artificial Sequence
  source: /note="Description of Artificial Sequence: Synthetic oligonucleotide"
cacgtcggatacaaagcagac

SEQ ID NO: 32327 - DNA, 21 bp, Artificial Sequence
  source: /note="Description of Artificial Sequence: Synthetic oligonucleotide"
cacgtccacacaaacagcagc

SEQ ID NO: 32328 - DNA, 21 bp, Artificial Sequence
  source: /note="Description of Artificial Sequence: Synthetic oligonucleotide"
cacgtcatcgacagcgcagga

SEQ ID NO: 32329 - DNA, 21 bp, Artificial Sequence
  source: /note="Description of Artificial Sequence: Synthetic oligonucleotide"
cacgtcaaagcactcggaagc

SEQ ID NO: 32330 - DNA, 21 bp, Artificial Sequence
  source: /note="Description of Artificial Sequence: Synthetic oligonucleotide"
cacgtcaaactcagcagcaac

SEQ ID NO: 32331 - DNA, 21 bp, Artificial Sequence
  source: /note="Description of Artificial Sequence: Synthetic oligonucleotide"
cacgtcctcaaaaacccaaca

SEQ ID NO: 32332 - DNA, 21 bp, Artificial Sequence
  source: /note="Description of Artificial Sequence: Synthetic oligonucleotide"
cacgtcctcccaacaagacca

SEQ ID NO: 32333 - DNA, 21 bp, Artificial Sequence
  source: /note="Description of Artificial Sequence: Synthetic oligonucleotide"
cacgtcctcagcccaacaaga

SEQ ID NO: 32334 - DNA, 21 bp, Artificial Sequence
  source: /note="Description of Artificial Sequence: Synthetic oligonucleotide"
cacgtcatggaagcaagcagc

SEQ ID NO: 32335 - DNA, 21 bp, Artificial Sequence
  source: /note="Description of Artificial Sequence: Synthetic oligonucleotide"
cacgtcccaatgagcatgcca

SEQ ID NO: 32336 - DNA, 21 bp, Artificial Sequence
  source: /note="Description of Artificial Sequence: Synthetic oligonucleotide"
cacgtccaaaacagccaaaca

SEQ ID NO: 32337 - DNA, 21 bp, Artificial Sequence
  source: /note="Description of Artificial Sequence: Synthetic oligonucleotide"
cacgtcagaggaacaggaagc

SEQ ID NO: 32338 - DNA, 21 bp, Artificial Sequence
  source: /note="Description of Artificial Sequence: Synthetic oligonucleotide"
cacgtcagaccaggattcaca

SEQ ID NO: 32339 - DNA, 21 bp, Artificial Sequence
  source: /note="Description of Artificial Sequence: Synthetic oligonucleotide"
cacgtcagcgaacacacatac

SEQ ID NO: 32340 - DNA, 21 bp, Artificial Sequence
  source: /note="Description of Artificial Sequence: Synthetic oligonucleotide"
cacgtcagcggaccaagagca

SEQ ID NO: 32341 - DNA, 21 bp, Artificial Sequence
  source: /note="Description of Artificial Sequence: Synthetic oligonucleotide"
cacgtcagccacgcaatgcaa

SEQ ID NO: 32342 - DNA, 21 bp, Artificial Sequence
  source: /note="Description of Artificial Sequence: Synthetic oligonucleotide"
cacgtcagccacagcgtcatc

SEQ ID NO: 32343 - DNA, 21 bp, Artificial Sequence
  source: /note="Description of Artificial Sequence: Synthetic oligonucleotide"
cacgtcagcaaactcgacaca

SEQ ID NO: 32344 - DNA, 21 bp, Artificial Sequence
  source: /note="Description of Artificial Sequence: Synthetic oligonucleotide"
cacgtcagcatgagcgtccca

SEQ ID NO: 32345 - DNA, 21 bp, Artificial Sequence
  source: /note="Description of Artificial Sequence: Synthetic oligonucleotide"
cacgtcagcaacatcatcagc

SEQ ID NO: 32346 - DNA, 21 bp, Artificial Sequence
  source: /note="Description of Artificial Sequence: Synthetic oligonucleotide"
cacgtcagcaaccaactcaac

SEQ ID NO: 32347 - DNA, 21 bp, Artificial Sequence
  source: /note="Description of Artificial Sequence: Synthetic oligonucleotide"
cacgtcagcccaccagcaaac

SEQ ID NO: 32348 - DNA, 21 bp, Artificial Sequence
  source: /note="Description of Artificial Sequence: Synthetic oligonucleotide"
cacgtcagcagcgcaagcctc

SEQ ID NO: 32349 - DNA, 21 bp, Artificial Sequence
  source: /note="Description of Artificial Sequence: Synthetic oligonucleotide"
cacgtcagcagcgacagcaga

SEQ ID NO: 32350 - DNA, 21 bp, Artificial Sequence
  source: /note="Description of Artificial Sequence: Synthetic oligonucleotide"
cacgtcagcagcccaagcctc

SEQ ID NO: 32351 - DNA, 21 bp, Artificial Sequence
  source: /note="Description of Artificial Sequence: Synthetic oligonucleotide"
cacgtcagcacagaaccaagc

SEQ ID NO: 32352 - DNA, 21 bp, Artificial Sequence
  source: /note="Description of Artificial Sequence: Synthetic oligonucleotide"
cacgtcagctacgacctcaca

SEQ ID NO: 32353 - DNA, 21 bp, Artificial Sequence
  source: /note="Description of Artificial Sequence: Synthetic oligonucleotide"
cacgtcacaccaggattcgaa

SEQ ID NO: 32354 - DNA, 21 bp, Artificial Sequence
  source: /note="Description of Artificial Sequence: Synthetic oligonucleotide"
cacgtcacaagcccatacctc

SEQ ID NO: 32355 - DNA, 21 bp, Artificial Sequence
  source: /note="Description of Artificial Sequence: Synthetic oligonucleotide"
cacgtcgtcggaggaagcagc

SEQ ID NO: 32356 - DNA, 21 bp, Artificial Sequence
  source: /note="Description of Artificial Sequence: Synthetic oligonucleotide"
cacgtcgtcagcagattcgtc

SEQ ID NO: 32357 - DNA, 21 bp, Artificial Sequence
  source: /note="Description of Artificial Sequence: Synthetic oligonucleotide"
cactacgcaccaatctgcgaa

SEQ ID NO: 32358 - DNA, 21 bp, Artificial Sequence
  source: /note="Description of Artificial Sequence: Synthetic oligonucleotide"
cactacgacagcaacgcacca

SEQ ID NO: 32359 - DNA, 21 bp, Artificial Sequence
  source: /note="Description of Artificial Sequence: Synthetic oligonucleotide"
cactacgaattcgtcgacaaa

SEQ ID NO: 32360 - DNA, 21 bp, Artificial Sequence
  source: /note="Description of Artificial Sequence: Synthetic oligonucleotide"
cactacgaaagctgcaaccca

SEQ ID NO: 32361 - DNA, 21 bp, Artificial Sequence
  source: /note="Description of Artificial Sequence: Synthetic oligonucleotide"
cactacgaaagcaacgacgtc

SEQ ID NO: 32362 - DNA, 21 bp, Artificial Sequence
  source: /note="Description of Artificial Sequence: Synthetic oligonucleotide"
cactacttcgacatgggacca

SEQ ID NO: 32363 - DNA, 21 bp, Artificial Sequence
  source: /note="Description of Artificial Sequence: Synthetic oligonucleotide"
cactacggaatggtcagcgca

SEQ ID NO: 32364 - DNA, 21 bp, Artificial Sequence
  source: /note="Description of Artificial Sequence: Synthetic oligonucleotide"
cactacggaagcacaagagaa

SEQ ID NO: 32365 - DNA, 21 bp, Artificial Sequence
  source: /note="Description of Artificial Sequence: Synthetic oligonucleotide"
cactacatcaacccaacaaac

SEQ ID NO: 32366 - DNA, 21 bp, Artificial Sequence
  source: /note="Description of Artificial Sequence: Synthetic oligonucleotide"
cactacccaccaacatacgac

SEQ ID NO: 32367 - DNA, 21 bp, Artificial Sequence
  source: /note="Description of Artificial Sequence: Synthetic oligonucleotide"
cactacccaagcacaagcagc

SEQ ID NO: 32368 - DNA, 21 bp, Artificial Sequence
  source: /note="Description of Artificial Sequence: Synthetic oligonucleotide"
cactaccaaatcagcacaaca

SEQ ID NO: 32369 - DNA, 21 bp, Artificial Sequence
  source: /note="Description of Artificial Sequence: Synthetic oligonucleotide"
cactacagcatcagcggagca

SEQ ID NO: 32370 - DNA, 21 bp, Artificial Sequence
  source: /note="Description of Artificial Sequence: Synthetic oligonucleotide"
cactacagcccaaaaccaagc

SEQ ID NO: 32371 - DNA, 21 bp, Artificial Sequence
  source: /note="Description of Artificial Sequence: Synthetic oligonucleotide"
cactacgtcgaacacagacaa

SEQ ID NO: 32372 - DNA, 21 bp, Artificial Sequence
  source: /note="Description of Artificial Sequence: Synthetic oligonucleotide"
atcgcagcagcagcaatgaca

SEQ ID NO: 32373 - DNA, 21 bp, Artificial Sequence
  source: /note="Description of Artificial Sequence: Synthetic oligonucleotide"
atcgcagcaaacatgcacaac

SEQ ID NO: 32374 - DNA, 21 bp, Artificial Sequence
  source: /note="Description of Artificial Sequence: Synthetic oligonucleotide"
atcgcagcaacaccagaacaa

SEQ ID NO: 32375 - DNA, 21 bp, Artificial Sequence
  source: /note="Description of Artificial Sequence: Synthetic oligonucleotide"
atcgcatgcagcagcgaactc

SEQ ID NO: 32376 - DNA, 21 bp, Artificial Sequence
  source: /note="Description of Artificial Sequence: Synthetic oligonucleotide"
atcgcagacgtcctcggatac

SEQ ID NO: 32377 - DNA, 21 bp, Artificial Sequence
  source: /note="Description of Artificial Sequence: Synthetic oligonucleotide"
atcgcaggaatcagcgacatc

SEQ ID NO: 32378 - DNA, 21 bp, Artificial Sequence
  source: /note="Description of Artificial Sequence: Synthetic oligonucleotide"
atcgcacacgaaagaagcgac

SEQ ID NO: 32379 - DNA, 21 bp, Artificial Sequence
  source: /note="Description of Artificial Sequence: Synthetic oligonucleotide"
atcgcacacagagcaagcgca

SEQ ID NO: 32380 - DNA, 21 bp, Artificial Sequence
  source: /note="Description of Artificial Sequence: Synthetic oligonucleotide"
atcgcactcccaaaagtcgca

SEQ ID NO: 32381 - DNA, 21 bp, Artificial Sequence
  source: /note="Description of Artificial Sequence: Synthetic oligonucleotide"
atcgcaaacctcacacaaagc

SEQ ID NO: 32382 - DNA, 21 bp, Artificial Sequence
  source: /note="Description of Artificial Sequence: Synthetic oligonucleotide"
atcgcaccaggagtcagcagc

SEQ ID NO: 32383 - DNA, 21 bp, Artificial Sequence
  source: /note="Description of Artificial Sequence: Synthetic oligonucleotide"
atcgcaccactcacagtcagc

SEQ ID NO: 32384 - DNA, 21 bp, Artificial Sequence
  source: /note="Description of Artificial Sequence: Synthetic oligonucleotide"
atcgcaccaaacaaactcaca

SEQ ID NO: 32385 - DNA, 21 bp, Artificial Sequence
  source: /note="Description of Artificial Sequence: Synthetic oligonucleotide"
atcgcacaacaacaccaaatc

SEQ ID NO: 32386 - DNA, 21 bp, Artificial Sequence
  source: /note="Description of Artificial Sequence: Synthetic oligonucleotide"
atcgcaagagcagcaaacttc

SEQ ID NO: 32387 - DNA, 21 bp, Artificial Sequence
  source: /note="Description of Artificial Sequence: Synthetic oligonucleotide"
atcgcaagaggacaaccattc

SEQ ID NO: 32388 - DNA, 21 bp, Artificial Sequence
  source: /note="Description of Artificial Sequence: Synthetic oligonucleotide"
atcgcaagaggatacgacaac

SEQ ID NO: 32389 - DNA, 21 bp, Artificial Sequence
  source: /note="Description of Artificial Sequence: Synthetic oligonucleotide"
atcgcaagacacccaacacaa

SEQ ID NO: 32390 - DNA, 21 bp, Artificial Sequence
  source: /note="Description of Artificial Sequence: Synthetic oligonucleotide"
atcgcaagcgaatacagacaa

SEQ ID NO: 32391 - DNA, 21 bp, Artificial Sequence
  source: /note="Description of Artificial Sequence: Synthetic oligonucleotide"
atcgcaagcagccaactcaga

SEQ ID NO: 32392 - DNA, 21 bp, Artificial Sequence
  source: /note="Description of Artificial Sequence: Synthetic oligonucleotide"
atcgcaacaccagaaagcctc

SEQ ID NO: 32393 - DNA, 21 bp, Artificial Sequence
  source: /note="Description of Artificial Sequence: Synthetic oligonucleotide"
atcgcagtccacggaagagga

SEQ ID NO: 32394 - DNA, 21 bp, Artificial Sequence
  source: /note="Description of Artificial Sequence: Synthetic oligonucleotide"
atcgacgcaagcaaaagattc

SEQ ID NO: 32395 - DNA, 21 bp, Artificial Sequence
  source: /note="Description of Artificial Sequence: Synthetic oligonucleotide"
atcgacggaggaagcagcgac

SEQ ID NO: 32396 - DNA, 21 bp, Artificial Sequence
  source: /note="Description of Artificial Sequence: Synthetic oligonucleotide"
atcgacggaagagtcatcgga

SEQ ID NO: 32397 - DNA, 21 bp, Artificial Sequence
  source: /note="Description of Artificial Sequence: Synthetic oligonucleotide"
atcgacaaactcctcacattc

SEQ ID NO: 32398 - DNA, 21 bp, Artificial Sequence
  source: /note="Description of Artificial Sequence: Synthetic oligonucleotide"
atcgacctcctcgtcagaagc

SEQ ID NO: 32399 - DNA, 21 bp, Artificial Sequence
  source: /note="Description of Artificial Sequence: Synthetic oligonucleotide"
atcgacaacctccacgcagga

SEQ ID NO: 32400 - DNA, 21 bp, Artificial Sequence
  source: /note="Description of Artificial Sequence: Synthetic oligonucleotide"
atcgacaacccagtcagacca

SEQ ID NO: 32401 - DNA, 21 bp, Artificial Sequence
  source: /note="Description of Artificial Sequence: Synthetic oligonucleotide"
atcgacaacgtcaaaccagtc

SEQ ID NO: 32402 - DNA, 21 bp, Artificial Sequence
  source: /note="Description of Artificial Sequence: Synthetic oligonucleotide"
atcgacagcgcaacaacagac

SEQ ID NO: 32403 - DNA, 21 bp, Artificial Sequence
  source: /note="Description of Artificial Sequence: Synthetic oligonucleotide"
atcgacagccacccaagcagc

SEQ ID NO: 32404 - DNA, 21 bp, Artificial Sequence
  source: /note="Description of Artificial Sequence: Synthetic oligonucleotide"
atcgacagcagcacaaactgc

SEQ ID NO: 32405 - DNA, 21 bp, Artificial Sequence
  source: /note="Description of Artificial Sequence: Synthetic oligonucleotide"
atcgacagctacacaccacca

SEQ ID NO: 32406 - DNA, 21 bp, Artificial Sequence
  source: /note="Description of Artificial Sequence: Synthetic oligonucleotide"
atcgacacaatcagcacaagc

SEQ ID NO: 32407 - DNA, 21 bp, Artificial Sequence
  source: /note="Description of Artificial Sequence: Synthetic oligonucleotide"
atcgacacaccaagaggaaca

SEQ ID NO: 32408 - DNA, 21 bp, Artificial Sequence
  source: /note="Description of Artificial Sequence: Synthetic oligonucleotide"
atcgacacagtcccaagcaga

SEQ ID NO: 32409 - DNA, 21 bp, Artificial Sequence
  source: /note="Description of Artificial Sequence: Synthetic oligonucleotide"
atcgacgtcttcacaaacgca

SEQ ID NO: 32410 - DNA, 21 bp, Artificial Sequence
  source: /note="Description of Artificial Sequence: Synthetic oligonucleotide"
atcgactacaaaagcagcagc

SEQ ID NO: 32411 - DNA, 21 bp, Artificial Sequence
  source: /note="Description of Artificial Sequence: Synthetic oligonucleotide"
atcgactacagagcagcagca

SEQ ID NO: 32412 - DNA, 21 bp, Artificial Sequence
  source: /note="Description of Artificial Sequence: Synthetic oligonucleotide"
atcgaagcaagcagagtccaa

SEQ ID NO: 32413 - DNA, 21 bp, Artificial Sequence
  source: /note="Description of Artificial Sequence: Synthetic oligonucleotide"
atcgaaaaaaacctcacactc

SEQ ID NO: 32414 - DNA, 21 bp, Artificial Sequence
  source: /note="Description of Artificial Sequence: Synthetic oligonucleotide"
atcgaaaaagtcaacagagtc

SEQ ID NO: 32415 - DNA, 21 bp, Artificial Sequence
  source: /note="Description of Artificial Sequence: Synthetic oligonucleotide"
atcgaactcgcaagcagctgc

SEQ ID NO: 32416 - DNA, 21 bp, Artificial Sequence
  source: /note="Description of Artificial Sequence: Synthetic oligonucleotide"
atcgaactcaaaatgacaagc

SEQ ID NO: 32417 - DNA, 21 bp, Artificial Sequence
  source: /note="Description of Artificial Sequence: Synthetic oligonucleotide"
atcgaaatgctcaaaacagca

SEQ ID NO: 32418 - DNA, 21 bp, Artificial Sequence
  source: /note="Description of Artificial Sequence: Synthetic oligonucleotide"
atcgaaccaaaaacacacctc

SEQ ID NO: 32419 - DNA, 21 bp, Artificial Sequence
  source: /note="Description of Artificial Sequence: Synthetic oligonucleotide"
atcgaaccaagccactaccca

SEQ ID NO: 32420 - DNA, 21 bp, Artificial Sequence
  source: /note="Description of Artificial Sequence: Synthetic oligonucleotide"
atcgaaagaccaacaagccca

SEQ ID NO: 32421 - DNA, 21 bp, Artificial Sequence
  source: /note="Description of Artificial Sequence: Synthetic oligonucleotide"
atcgaaagaacaagcagcatg

SEQ ID NO: 32422 - DNA, 21 bp, Artificial Sequence
  source: /note="Description of Artificial Sequence: Synthetic oligonucleotide"
atcgaaagcgcaaacctcaac

SEQ ID NO: 32423 - DNA, 21 bp, Artificial Sequence
  source: /note="Description of Artificial Sequence: Synthetic oligonucleotide"
atcgaaagccacctcccaaga

SEQ ID NO: 32424 - DNA, 21 bp, Artificial Sequence
  source: /note="Description of Artificial Sequence: Synthetic oligonucleotide"
atcgaaacagcaccagaccac

SEQ ID NO: 32425 - DNA, 21 bp, Artificial Sequence
  source: /note="Description of Artificial Sequence: Synthetic oligonucleotide"
atcgaaacagtcaacaaaaca

SEQ ID NO: 32426 - DNA, 21 bp, Artificial Sequence
  source: /note="Description of Artificial Sequence: Synthetic oligonucleotide"
atcgaagtcagaacaagcatc

SEQ ID NO: 32427 - DNA, 21 bp, Artificial Sequence
  source: /note="Description of Artificial Sequence: Synthetic oligonucleotide"
atcgaatggggatgggaagac

SEQ ID NO: 32428 - DNA, 21 bp, Artificial Sequence
  source: /note="Description of Artificial Sequence: Synthetic oligonucleotide"
atcttcgcaggaacaggagaa

SEQ ID NO: 32429 - DNA, 21 bp, Artificial Sequence
  source: /note="Description of Artificial Sequence: Synthetic oligonucleotide"
atcttcgcaggagtcctccac

SEQ ID NO: 32430 - DNA, 21 bp, Artificial Sequence
  source: /note="Description of Artificial Sequence: Synthetic oligonucleotide"
atcttcgcagtcgcagcagaa

SEQ ID NO: 32431 - DNA, 21 bp, Artificial Sequence
  source: /note="Description of Artificial Sequence: Synthetic oligonucleotide"
atcttcaaaccagcaatgaca

SEQ ID NO: 32432 - DNA, 21 bp, Artificial Sequence
  source: /note="Description of Artificial Sequence: Synthetic oligonucleotide"
atcttcaacaacgcagcacca

SEQ ID NO: 32433 - DNA, 21 bp, Artificial Sequence
  source: /note="Description of Artificial Sequence: Synthetic oligonucleotide"
atcttcccactcacaggaagc

SEQ ID NO: 32434 - DNA, 21 bp, Artificial Sequence
  source: /note="Description of Artificial Sequence: Synthetic oligonucleotide"
atcttcagagacggagtcagc

SEQ ID NO: 32435 - DNA, 21 bp, Artificial Sequence
  source: /note="Description of Artificial Sequence: Synthetic oligonucleotide"
atcttcagcgcaggaccactc

SEQ ID NO: 32436 - DNA, 21 bp, Artificial Sequence
  source: /note="Description of Artificial Sequence: Synthetic oligonucleotide"
atcttcagccacgtcggaagc

SEQ ID NO: 32437 - DNA, 21 bp, Artificial Sequence
  source: /note="Description of Artificial Sequence: Synthetic oligonucleotide"
atcttcgtcccagaaccagga

SEQ ID NO: 32438 - DNA, 21 bp, Artificial Sequence
  source: /note="Description of Artificial Sequence: Synthetic oligonucleotide"
atcggagcaggagcaagcatg

SEQ ID NO: 32439 - DNA, 21 bp, Artificial Sequence
  source: /note="Description of Artificial Sequence: Synthetic oligonucleotide"
atcggagcaatcgcagacgtc

SEQ ID NO: 32440 - DNA, 21 bp, Artificial Sequence
  source: /note="Description of Artificial Sequence: Synthetic oligonucleotide"
atcggagcactcgtcagccca

SEQ ID NO: 32441 - DNA, 21 bp, Artificial Sequence
  source: /note="Description of Artificial Sequence: Synthetic oligonucleotide"
atcggagcaatgagcagcgca

SEQ ID NO: 32442 - DNA, 21 bp, Artificial Sequence
  source: /note="Description of Artificial Sequence: Synthetic oligonucleotide"
atcggagcaccatacaacagc

SEQ ID NO: 32443 - DNA, 21 bp, Artificial Sequence
  source: /note="Description of Artificial Sequence: Synthetic oligonucleotide"
atcggagcaagcctcctcgga

SEQ ID NO: 32444 - DNA, 21 bp, Artificial Sequence
  source: /note="Description of Artificial Sequence: Synthetic oligonucleotide"
atcggagaaagaagaccagtc

SEQ ID NO: 32445 - DNA, 21 bp, Artificial Sequence
  source: /note="Description of Artificial Sequence: Synthetic oligonucleotide"
atcggaggattcgtcaaagca

SEQ ID NO: 32446 - DNA, 21 bp, Artificial Sequence
  source: /note="Description of Artificial Sequence: Synthetic oligonucleotide"
atcggaggaacaatgacacac

SEQ ID NO: 32447 - DNA, 21 bp, Artificial Sequence
  source: /note="Description of Artificial Sequence: Synthetic oligonucleotide"
atcggacacggacacccaaac

SEQ ID NO: 32448 - DNA, 21 bp, Artificial Sequence
  source: /note="Description of Artificial Sequence: Synthetic oligonucleotide"
atcggacacagcgacaacaca

SEQ ID NO: 32449 - DNA, 21 bp, Artificial Sequence
  source: /note="Description of Artificial Sequence: Synthetic oligonucleotide"
atcggaaaactcctcaacaca

SEQ ID NO: 32450 - DNA, 21 bp, Artificial Sequence
  source: /note="Description of Artificial Sequence: Synthetic oligonucleotide"
atcggaaaaaaccacagcagc

SEQ ID NO: 32451 - DNA, 21 bp, Artificial Sequence
  source: /note="Description of Artificial Sequence: Synthetic oligonucleotide"
atcggaaaaccaggatacctc

SEQ ID NO: 32452 - DNA, 21 bp, Artificial Sequence
  source: /note="Description of Artificial Sequence: Synthetic oligonucleotide"
atcggactcgcaaaaacactc

SEQ ID NO: 32453 - DNA, 21 bp, Artificial Sequence
  source: /note="Description of Artificial Sequence: Synthetic oligonucleotide"
atcggactcacaagccaagtc

SEQ ID NO: 32454 - DNA, 21 bp, Artificial Sequence
  source: /note="Description of Artificial Sequence: Synthetic oligonucleotide"
atcggaatgcacagccaaagc

SEQ ID NO: 32455 - DNA, 21 bp, Artificial Sequence
  source: /note="Description of Artificial Sequence: Synthetic oligonucleotide"
atcggaaacagcagactcgga

SEQ ID NO: 32456 - DNA, 21 bp, Artificial Sequence
  source: /note="Description of Artificial Sequence: Synthetic oligonucleotide"
atcggacaattcagcagagtc

SEQ ID NO: 32457 - DNA, 21 bp, Artificial Sequence
  source: /note="Description of Artificial Sequence: Synthetic oligonucleotide"
atcggaagagacatgcacgca

SEQ ID NO: 32458 - DNA, 21 bp, Artificial Sequence
  source: /note="Description of Artificial Sequence: Synthetic oligonucleotide"
atcggaagaccaagctacgaa

SEQ ID NO: 32459 - DNA, 21 bp, Artificial Sequence
  source: /note="Description of Artificial Sequence: Synthetic oligonucleotide"
atcggaagacaaacaggaatc

SEQ ID NO: 32460 - DNA, 21 bp, Artificial Sequence
  source: /note="Description of Artificial Sequence: Synthetic oligonucleotide"
atcggaagaagcgaaggaaca

SEQ ID NO: 32461 - DNA, 21 bp, Artificial Sequence
  source: /note="Description of Artificial Sequence: Synthetic oligonucleotide"
atcggaagaagcccaagccca

SEQ ID NO: 32462 - DNA, 21 bp, Artificial Sequence
  source: /note="Description of Artificial Sequence: Synthetic oligonucleotide"
atcggaagccaccacagcaac

SEQ ID NO: 32463 - DNA, 21 bp, Artificial Sequence
  source: /note="Description of Artificial Sequence: Synthetic oligonucleotide"
atcggaagcaacgcactcagc

SEQ ID NO: 32464 - DNA, 21 bp, Artificial Sequence
  source: /note="Description of Artificial Sequence: Synthetic oligonucleotide"
atcggaagcacaatgtaccaa

SEQ ID NO: 32465 - DNA, 21 bp, Artificial Sequence
  source: /note="Description of Artificial Sequence: Synthetic oligonucleotide"
atcggaacaagcacatacgtc

SEQ ID NO: 32466 - DNA, 21 bp, Artificial Sequence
  source: /note="Description of Artificial Sequence: Synthetic oligonucleotide"
atcggaacaacaatgaaagga

SEQ ID NO: 32467 - DNA, 21 bp, Artificial Sequence
  source: /note="Description of Artificial Sequence: Synthetic oligonucleotide"
atcggagtcaaaacactccca

SEQ ID NO: 32468 - DNA, 21 bp, Artificial Sequence
  source: /note="Description of Artificial Sequence: Synthetic oligonucleotide"
atcggagtcctccacctccca

SEQ ID NO: 32469 - DNA, 21 bp, Artificial Sequence
  source: /note="Description of Artificial Sequence: Synthetic oligonucleotide"
atccacgcagcaagcacagac

SEQ ID NO: 32470 - DNA, 21 bp, Artificial Sequence
  source: /note="Description of Artificial Sequence: Synthetic oligonucleotide"
atccacgcaaactggatcgac

SEQ ID NO: 32471 - DNA, 21 bp, Artificial Sequence
  source: /note="Description of Artificial Sequence: Synthetic oligonucleotide"
atccacgacttcacaagcgtc

SEQ ID NO: 32472 - DNA, 21 bp, Artificial Sequence
  source: /note="Description of Artificial Sequence: Synthetic oligonucleotide"
atccacgaactcagcggactc

SEQ ID NO: 32473 - DNA, 21 bp, Artificial Sequence
  source: /note="Description of Artificial Sequence: Synthetic oligonucleotide"
atccacttccaaagcagccaa

SEQ ID NO: 32474 - DNA, 21 bp, Artificial Sequence
  source: /note="Description of Artificial Sequence: Synthetic oligonucleotide"
atccacggaggaagctacaca

SEQ ID NO: 32475 - DNA, 21 bp, Artificial Sequence
  source: /note="Description of Artificial Sequence: Synthetic oligonucleotide"
atccacggaagcacagacaga

SEQ ID NO: 32476 - DNA, 21 bp, Artificial Sequence
  source: /note="Description of Artificial Sequence: Synthetic oligonucleotide"
atccaccacgacccagcaagc

SEQ ID NO: 32477 - DNA, 21 bp, Artificial Sequence
  source: /note="Description of Artificial Sequence: Synthetic oligonucleotide"
atccacctcccaacaagcctc

SEQ ID NO: 32478 - DNA, 21 bp, Artificial Sequence
  source: /note="Description of Artificial Sequence: Synthetic oligonucleotide"
atccacaacagaccactcatg

SEQ ID NO: 32479 - DNA, 21 bp, Artificial Sequence
  source: /note="Description of Artificial Sequence: Synthetic oligonucleotide"
atccacaacacactcgcagca

SEQ ID NO: 32480 - DNA, 21 bp, Artificial Sequence
  source: /note="Description of Artificial Sequence: Synthetic oligonucleotide"
atccacaacgtcgtcgtccaa

SEQ ID NO: 32481 - DNA, 21 bp, Artificial Sequence
  source: /note="Description of Artificial Sequence: Synthetic oligonucleotide"
atccacccaggaagagtcgca

SEQ ID NO: 32482 - DNA, 21 bp, Artificial Sequence
  source: /note="Description of Artificial Sequence: Synthetic oligonucleotide"
atccacccaacaagacaagga

SEQ ID NO: 32483 - DNA, 21 bp, Artificial Sequence
  source: /note="Description of Artificial Sequence: Synthetic oligonucleotide"
atccaccaagcaggacaacca

SEQ ID NO: 32484 - DNA, 21 bp, Artificial Sequence
  source: /note="Description of Artificial Sequence: Synthetic oligonucleotide"
atccaccaaagcagcgaaagc

SEQ ID NO: 32485 - DNA, 21 bp, Artificial Sequence
  source: /note="Description of Artificial Sequence: Synthetic oligonucleotide"
atccacagagtcatcacaagc

SEQ ID NO: 32486 - DNA, 21 bp, Artificial Sequence
  source: /note="Description of Artificial Sequence: Synthetic oligonucleotide"
atccacagcgaaggaagcctc

SEQ ID NO: 32487 - DNA, 21 bp, Artificial Sequence
  source: /note="Description of Artificial Sequence: Synthetic oligonucleotide"
atccacagcctccaacaagaa

SEQ ID NO: 32488 - DNA, 21 bp, Artificial Sequence
  source: /note="Description of Artificial Sequence: Synthetic oligonucleotide"
atccacagcagcatcgacttc

SEQ ID NO: 32489 - DNA, 21 bp, Artificial Sequence
  source: /note="Description of Artificial Sequence: Synthetic oligonucleotide"
atccacagcagcccagcagca

SEQ ID NO: 32490 - DNA, 21 bp, Artificial Sequence
  source: /note="Description of Artificial Sequence: Synthetic oligonucleotide"
atccacagctacgacagaagc

SEQ ID NO: 32491 - DNA, 21 bp, Artificial Sequence
  source: /note="Description of Artificial Sequence: Synthetic oligonucleotide"
atccacacagcagtcgaactc

SEQ ID NO: 32492 - DNA, 21 bp, Artificial Sequence
  source: /note="Description of Artificial Sequence: Synthetic oligonucleotide"
atccacacaggaaactacatg

SEQ ID NO: 32493 - DNA, 21 bp, Artificial Sequence
  source: /note="Description of Artificial Sequence: Synthetic oligonucleotide"
atccacacaaacgcaccacca

SEQ ID NO: 32494 - DNA, 21 bp, Artificial Sequence
  source: /note="Description of Artificial Sequence: Synthetic oligonucleotide"
atccacacaacacaaagaaca

SEQ ID NO: 32495 - DNA, 21 bp, Artificial Sequence
  source: /note="Description of Artificial Sequence: Synthetic oligonucleotide"
atcatcgcagaacacccagca

SEQ ID NO: 32496 - DNA, 21 bp, Artificial Sequence
  source: /note="Description of Artificial Sequence: Synthetic oligonucleotide"
atcatcgcaagactcccacca

SEQ ID NO: 32497 - DNA, 21 bp, Artificial Sequence
  source: /note="Description of Artificial Sequence: Synthetic oligonucleotide"
atcatcgacaaccacatcaga

SEQ ID NO: 32498 - DNA, 21 bp, Artificial Sequence
  source: /note="Description of Artificial Sequence: Synthetic oligonucleotide"
atcatcttccaagacatgcca

SEQ ID NO: 32499 - DNA, 21 bp, Artificial Sequence
  source: /note="Description of Artificial Sequence: Synthetic oligonucleotide"
atcatcggagcaaacgaacca

SEQ ID NO: 32500 - DNA, 21 bp, Artificial Sequence
  source: /note="Description of Artificial Sequence: Synthetic oligonucleotide"
atcatcggaaaaggaacagga

SEQ ID NO: 32501 - DNA, 21 bp, Artificial Sequence
  source: /note="Description of Artificial Sequence: Synthetic oligonucleotide"
atcatccacgacacacacaac

SEQ ID NO: 32502 - DNA, 21 bp, Artificial Sequence
  source: /note="Description of Artificial Sequence: Synthetic oligonucleotide"
atcatccacgaagcaagacca

SEQ ID NO: 32503 - DNA, 21 bp, Artificial Sequence
  source: /note="Description of Artificial Sequence: Synthetic oligonucleotide"
atcatcagagacagccaactc

SEQ ID NO: 32504 - DNA, 21 bp, Artificial Sequence
  source: /note="Description of Artificial Sequence: Synthetic oligonucleotide"
atcatcagcctcacaacaagc

SEQ ID NO: 32505 - DNA, 21 bp, Artificial Sequence
  source: /note="Description of Artificial Sequence: Synthetic oligonucleotide"
atcaaagacgcaggaagccca

SEQ ID NO: 32506 - DNA, 21 bp, Artificial Sequence
  source: /note="Description of Artificial Sequence: Synthetic oligonucleotide"
atcaaagacgcacaaccatgg

SEQ ID NO: 32507 - DNA, 21 bp, Artificial Sequence
  source: /note="Description of Artificial Sequence: Synthetic oligonucleotide"
atcaaagaccaatggaacatg

SEQ ID NO: 32508 - DNA, 21 bp, Artificial Sequence
  source: /note="Description of Artificial Sequence: Synthetic oligonucleotide"
atcaaattcccaacagcagac

SEQ ID NO: 32509 - DNA, 21 bp, Artificial Sequence
  source: /note="Description of Artificial Sequence: Synthetic oligonucleotide"
atcaaaatcgaagacccaaga

SEQ ID NO: 32510 - DNA, 21 bp, Artificial Sequence
  source: /note="Description of Artificial Sequence: Synthetic oligonucleotide"
atcaaaatggcacaaggattc

SEQ ID NO: 32511 - DNA, 21 bp, Artificial Sequence
  source: /note="Description of Artificial Sequence: Synthetic oligonucleotide"
atcaaaaacctcgcaagccac

SEQ ID NO: 32512 - DNA, 21 bp, Artificial Sequence
  source: /note="Description of Artificial Sequence: Synthetic oligonucleotide"
atcaaaccaatcggaggagtc

SEQ ID NO: 32513 - DNA, 21 bp, Artificial Sequence
  source: /note="Description of Artificial Sequence: Synthetic oligonucleotide"
atcaaaccaatgagcggaaca

SEQ ID NO: 32514 - DNA, 21 bp, Artificial Sequence
  source: /note="Description of Artificial Sequence: Synthetic oligonucleotide"
atcaaacaaccactccacaac

SEQ ID NO: 32515 - DNA, 21 bp, Artificial Sequence
  source: /note="Description of Artificial Sequence: Synthetic oligonucleotide"
atcaaaagaacactcagcgac

SEQ ID NO: 32516 - DNA, 21 bp, Artificial Sequence
  source: /note="Description of Artificial Sequence: Synthetic oligonucleotide"
atcaaaagcgacgacggaagc

SEQ ID NO: 32517 - DNA, 21 bp, Artificial Sequence
  source: /note="Description of Artificial Sequence: Synthetic oligonucleotide"
atcaaaagcgaaggaagcctc

SEQ ID NO: 32518 - DNA, 21 bp, Artificial Sequence
  source: /note="Description of Artificial Sequence: Synthetic oligonucleotide"
atcaaaacagaatggagccac

SEQ ID NO: 32519 - DNA, 21 bp, Artificial Sequence
  source: /note="Description of Artificial Sequence: Synthetic oligonucleotide"
atcaaaacattcacaagcagc

SEQ ID NO: 32520 - DNA, 21 bp, Artificial Sequence
  source: /note="Description of Artificial Sequence: Synthetic oligonucleotide"
atcctcgacttcctcccagac

SEQ ID NO: 32521 - DNA, 21 bp, Artificial Sequence
  source: /note="Description of Artificial Sequence: Synthetic oligonucleotide"
atcctcggaggactcgacaga

SEQ ID NO: 32522 - DNA, 21 bp, Artificial Sequence
  source: /note="Description of Artificial Sequence: Synthetic oligonucleotide"
atcctcggaaacacaagagaa

SEQ ID NO: 32523 - DNA, 21 bp, Artificial Sequence
  source: /note="Description of Artificial Sequence: Synthetic oligonucleotide"
atcctcggaagaagcgcagca

SEQ ID NO: 32524 - DNA, 21 bp, Artificial Sequence
  source: /note="Description of Artificial Sequence: Synthetic oligonucleotide"
atcctcggaacaagaccactc

SEQ ID NO: 32525 - DNA, 21 bp, Artificial Sequence
  source: /note="Description of Artificial Sequence: Synthetic oligonucleotide"
atcctcggaacaagcgtccaa

SEQ ID NO: 32526 - DNA, 21 bp, Artificial Sequence
  source: /note="Description of Artificial Sequence: Synthetic oligonucleotide"
atcctccacggaagaggagca

SEQ ID NO: 32527 - DNA, 21 bp, Artificial Sequence
  source: /note="Description of Artificial Sequence: Synthetic oligonucleotide"
atcctccacctcgtcagactc

SEQ ID NO: 32528 - DNA, 21 bp, Artificial Sequence
  source: /note="Description of Artificial Sequence: Synthetic oligonucleotide"
atcctccacagcccaacagtc

SEQ ID NO: 32529 - DNA, 21 bp, Artificial Sequence
  source: /note="Description of Artificial Sequence: Synthetic oligonucleotide"
atcctccacgtcgaaatgaga

SEQ ID NO: 32530 - DNA, 21 bp, Artificial Sequence
  source: /note="Description of Artificial Sequence: Synthetic oligonucleotide"
atcctcaaacacatcggactc

SEQ ID NO: 32531 - DNA, 21 bp, Artificial Sequence
  source: /note="Description of Artificial Sequence: Synthetic oligonucleotide"
atcctcaaacaacaagcaaac

SEQ ID NO: 32532 - DNA, 21 bp, Artificial Sequence
  source: /note="Description of Artificial Sequence: Synthetic oligonucleotide"
atcctcctcgacgacgaaagc

SEQ ID NO: 32533 - DNA, 21 bp, Artificial Sequence
  source: /note="Description of Artificial Sequence: Synthetic oligonucleotide"
atcctcctccacccaagagga

SEQ ID NO: 32534 - DNA, 21 bp, Artificial Sequence
  source: /note="Description of Artificial Sequence: Synthetic oligonucleotide"
atcctcctcatgggaacaagc

SEQ ID NO: 32535 - DNA, 21 bp, Artificial Sequence
  source: /note="Description of Artificial Sequence: Synthetic oligonucleotide"
atcctcctcagaaaagaccca

SEQ ID NO: 32536 - DNA, 21 bp, Artificial Sequence
  source: /note="Description of Artificial Sequence: Synthetic oligonucleotide"
atcctcctcagcgaaggacac

SEQ ID NO: 32537 - DNA, 21 bp, Artificial Sequence
  source: /note="Description of Artificial Sequence: Synthetic oligonucleotide"
atcctcctcagcatcagagac

SEQ ID NO: 32538 - DNA, 21 bp, Artificial Sequence
  source: /note="Description of Artificial Sequence: Synthetic oligonucleotide"
atcctcatgagcgcacaaagc

SEQ ID NO: 32539 - DNA, 21 bp, Artificial Sequence
  source: /note="Description of Artificial Sequence: Synthetic oligonucleotide"
atcctcatggtcgacgacaca

SEQ ID NO: 32540 - DNA, 21 bp, Artificial Sequence
  source: /note="Description of Artificial Sequence: Synthetic oligonucleotide"
atcctcaacgacagaagcgca

SEQ ID NO: 32541 - DNA, 21 bp, Artificial Sequence
  source: /note="Description of Artificial Sequence: Synthetic oligonucleotide"
atcctcaaccacggaaaagga

SEQ ID NO: 32542 - DNA, 21 bp, Artificial Sequence
  source: /note="Description of Artificial Sequence: Synthetic oligonucleotide"
atcctcaacaaaccactcagc

SEQ ID NO: 32543 - DNA, 21 bp, Artificial Sequence
  source: /note="Description of Artificial Sequence: Synthetic oligonucleotide"
atcctcccacacacaacaaca

SEQ ID NO: 32544 - DNA, 21 bp, Artificial Sequence
  source: /note="Description of Artificial Sequence: Synthetic oligonucleotide"
atcctcccaaacagcatgcca

SEQ ID NO: 32545 - DNA, 21 bp, Artificial Sequence
  source: /note="Description of Artificial Sequence: Synthetic oligonucleotide"
atcctcccaaacacaggacca

SEQ ID NO: 32546 - DNA, 21 bp, Artificial Sequence
  source: /note="Description of Artificial Sequence: Synthetic oligonucleotide"
atcctcccaccaatcacagac

SEQ ID NO: 32547 - DNA, 21 bp, Artificial Sequence
  source: /note="Description of Artificial Sequence: Synthetic oligonucleotide"
atcctcccaagcctcacagca

SEQ ID NO: 32548 - DNA, 21 bp, Artificial Sequence
  source: /note="Description of Artificial Sequence: Synthetic oligonucleotide"
atcctcccaagcagcttcagc

SEQ ID NO: 32549 - DNA, 21 bp, Artificial Sequence
  source: /note="Description of Artificial Sequence: Synthetic oligonucleotide"
atcctcccatacagcagccca

SEQ ID NO: 32550 - DNA, 21 bp, Artificial Sequence
  source: /note="Description of Artificial Sequence: Synthetic oligonucleotide"
atcctccaagcacaccaaaca

SEQ ID NO: 32551 - DNA, 21 bp, Artificial Sequence
  source: /note="Description of Artificial Sequence: Synthetic oligonucleotide"
atcctccaaagcgaattcaca

SEQ ID NO: 32552 - DNA, 21 bp, Artificial Sequence
  source: /note="Description of Artificial Sequence: Synthetic oligonucleotide"
atcctcagaggagacggacca

SEQ ID NO: 32553 - DNA, 21 bp, Artificial Sequence
  source: /note="Description of Artificial Sequence: Synthetic oligonucleotide"
atcctcagaggaaacggaagc

SEQ ID NO: 32554 - DNA, 21 bp, Artificial Sequence
  source: /note="Description of Artificial Sequence: Synthetic oligonucleotide"
atcctcagaacagaatacaaa

SEQ ID NO: 32555 - DNA, 21 bp, Artificial Sequence
  source: /note="Description of Artificial Sequence: Synthetic oligonucleotide"
atcctcagagtccacacacca

SEQ ID NO: 32556 - DNA, 21 bp, Artificial Sequence
  source: /note="Description of Artificial Sequence: Synthetic oligonucleotide"
atcctcagcgaaagaacacca

SEQ ID NO: 32557 - DNA, 21 bp, Artificial Sequence
  source: /note="Description of Artificial Sequence: Synthetic oligonucleotide"
atcctcagcatggacacagca

SEQ ID NO: 32558 - DNA, 21 bp, Artificial Sequence
  source: /note="Description of Artificial Sequence: Synthetic oligonucleotide"
atcctcacaggaagccacgca

SEQ ID NO: 32559 - DNA, 21 bp, Artificial Sequence
  source: /note="Description of Artificial Sequence: Synthetic oligonucleotide"
atcctcacaaaagacgtcagc

SEQ ID NO: 32560 - DNA, 21 bp, Artificial Sequence
  source: /note="Description of Artificial Sequence: Synthetic oligonucleotide"
atcctcacaaaaagcccaaca

SEQ ID NO: 32561 - DNA, 21 bp, Artificial Sequence
  source: /note="Description of Artificial Sequence: Synthetic oligonucleotide"
atcctcacaagagtcagccca

SEQ ID NO: 32562 - DNA, 21 bp, Artificial Sequence
  source: /note="Description of Artificial Sequence: Synthetic oligonucleotide"
atcctcacaagcgtcacaaaa

SEQ ID NO: 32563 - DNA, 21 bp, Artificial Sequence
  source: /note="Description of Artificial Sequence: Synthetic oligonucleotide"
atcctcgtcagcgaactcaga

SEQ ID NO: 32564 - DNA, 21 bp, Artificial Sequence
  source: /note="Description of Artificial Sequence: Synthetic oligonucleotide"
atcatggcaccaacaacacaa

SEQ ID NO: 32565 - DNA, 21 bp, Artificial Sequence
  source: /note="Description of Artificial Sequence: Synthetic oligonucleotide"
atcatggacgcacacatcgca

SEQ ID NO: 32566 - DNA, 21 bp, Artificial Sequence
  source: /note="Description of Artificial Sequence: Synthetic oligonucleotide"
atcatggacgtcaaattccac

SEQ ID NO: 32567 - DNA, 21 bp, Artificial Sequence
  source: /note="Description of Artificial Sequence: Synthetic oligonucleotide"
atcatggaagtcagaggacca

SEQ ID NO: 32568 - DNA, 21 bp, Artificial Sequence
  source: /note="Description of Artificial Sequence: Synthetic oligonucleotide"
atcatgggagaaccaagaaaa

SEQ ID NO: 32569 - DNA, 21 bp, Artificial Sequence
  source: /note="Description of Artificial Sequence: Synthetic oligonucleotide"
atcatgggaagcgcaccaagc

SEQ ID NO: 32570 - DNA, 21 bp, Artificial Sequence
  source: /note="Description of Artificial Sequence: Synthetic oligonucleotide"
atcatgggaagcgcaccatac

SEQ ID NO: 32571 - DNA, 21 bp, Artificial Sequence
  source: /note="Description of Artificial Sequence: Synthetic oligonucleotide"
atcatgctcccagacgcagac

SEQ ID NO: 32572 - DNA, 21 bp, Artificial Sequence
  source: /note="Description of Artificial Sequence: Synthetic oligonucleotide"
atcatgaacgcaaacagagca

SEQ ID NO: 32573 - DNA, 21 bp, Artificial Sequence
  source: /note="Description of Artificial Sequence: Synthetic oligonucleotide"
atcatgaacagaatcagcgca

SEQ ID NO: 32574 - DNA, 21 bp, Artificial Sequence
  source: /note="Description of Artificial Sequence: Synthetic oligonucleotide"
atcatgccaaacagcagcgac

SEQ ID NO: 32575 - DNA, 21 bp, Artificial Sequence
  source: /note="Description of Artificial Sequence: Synthetic oligonucleotide"
atcatgccaagcagcacaaac

SEQ ID NO: 32576 - DNA, 21 bp, Artificial Sequence
  source: /note="Description of Artificial Sequence: Synthetic oligonucleotide"
atcatgagaccaagcgaccca

SEQ ID NO: 32577 - DNA, 21 bp, Artificial Sequence
  source: /note="Description of Artificial Sequence: Synthetic oligonucleotide"
atcatgagcacaacaacactc

SEQ ID NO: 32578 - DNA, 21 bp, Artificial Sequence
  source: /note="Description of Artificial Sequence: Synthetic oligonucleotide"
atcatgacaatgacaccaagc

SEQ ID NO: 32579 - DNA, 21 bp, Artificial Sequence
  source: /note="Description of Artificial Sequence: Synthetic oligonucleotide"
atcaacgcacaaacacacctc

SEQ ID NO: 32580 - DNA, 21 bp, Artificial Sequence
  source: /note="Description of Artificial Sequence: Synthetic oligonucleotide"
atcaacgcataccacgtccca

SEQ ID NO: 32581 - DNA, 21 bp, Artificial Sequence
  source: /note="Description of Artificial Sequence: Synthetic oligonucleotide"
atcaacgaacacgtcagactc

SEQ ID NO: 32582 - DNA, 21 bp, Artificial Sequence
  source: /note="Description of Artificial Sequence: Synthetic oligonucleotide"
atcaacgaaagcaacagagga

SEQ ID NO: 32583 - DNA, 21 bp, Artificial Sequence
  source: /note="Description of Artificial Sequence: Synthetic oligonucleotide"
atcaacggaagcgacagacaa

SEQ ID NO: 32584 - DNA, 21 bp, Artificial Sequence
  source: /note="Description of Artificial Sequence: Synthetic oligonucleotide"
atcaacggaacagcaaaacac

SEQ ID NO: 32585 - DNA, 21 bp, Artificial Sequence
  source: /note="Description of Artificial Sequence: Synthetic oligonucleotide"
atcaaccacagcagcatggga

SEQ ID NO: 32586 - DNA, 21 bp, Artificial Sequence
  source: /note="Description of Artificial Sequence: Synthetic oligonucleotide"
atcaacatcgcaagcgcagga

SEQ ID NO: 32587 - DNA, 21 bp, Artificial Sequence
  source: /note="Description of Artificial Sequence: Synthetic oligonucleotide"
atcaacaaaccaagcaacgga

SEQ ID NO: 32588 - DNA, 21 bp, Artificial Sequence
  source: /note="Description of Artificial Sequence: Synthetic oligonucleotide"
atcaacctccacgtcaaaagc

SEQ ID NO: 32589 - DNA, 21 bp, Artificial Sequence
  source: /note="Description of Artificial Sequence: Synthetic oligonucleotide"
atcaacctcagaccagcagca

SEQ ID NO: 32590 - DNA, 21 bp, Artificial Sequence
  source: /note="Description of Artificial Sequence: Synthetic oligonucleotide"
atcaacctcacaccaagattc

SEQ ID NO: 32591 - DNA, 21 bp, Artificial Sequence
  source: /note="Description of Artificial Sequence: Synthetic oligonucleotide"
atcaacatggcaggagtccac

SEQ ID NO: 32592 - DNA, 21 bp, Artificial Sequence
  source: /note="Description of Artificial Sequence: Synthetic oligonucleotide"
atcaacatgagcacaggaagc

SEQ ID NO: 32593 - DNA, 21 bp, Artificial Sequence
  source: /note="Description of Artificial Sequence: Synthetic oligonucleotide"
atcaacccacaaaacagaaca

SEQ ID NO: 32594 - DNA, 21 bp, Artificial Sequence
  source: /note="Description of Artificial Sequence: Synthetic oligonucleotide"
atcaacagaggagtcaacagc

SEQ ID NO: 32595 - DNA, 21 bp, Artificial Sequence
  source: /note="Description of Artificial Sequence: Synthetic oligonucleotide"
atcaacagaacaacaatggaa

SEQ ID NO: 32596 - DNA, 21 bp, Artificial Sequence
  source: /note="Description of Artificial Sequence: Synthetic oligonucleotide"
atcaacagagtcacagcagaa

SEQ ID NO: 32597 - DNA, 21 bp, Artificial Sequence
  source: /note="Description of Artificial Sequence: Synthetic oligonucleotide"
atcaacagcgcagcagtcctc

SEQ ID NO: 32598 - DNA, 21 bp, Artificial Sequence
  source: /note="Description of Artificial Sequence: Synthetic oligonucleotide"
atcaacagcggaagaagcaac

SEQ ID NO: 32599 - DNA, 21 bp, Artificial Sequence
  source: /note="Description of Artificial Sequence: Synthetic oligonucleotide"
atcaacagccacacactccaa

SEQ ID NO: 32600 - DNA, 21 bp, Artificial Sequence
  source: /note="Description of Artificial Sequence: Synthetic oligonucleotide"
atcaacagccaaaaaccacca

SEQ ID NO: 32601 - DNA, 21 bp, Artificial Sequence
  source: /note="Description of Artificial Sequence: Synthetic oligonucleotide"
atcaacagcagaaacggagtc

SEQ ID NO: 32602 - DNA, 21 bp, Artificial Sequence
  source: /note="Description of Artificial Sequence: Synthetic oligonucleotide"
atcaacacactcggaaacagc

SEQ ID NO: 32603 - DNA, 21 bp, Artificial Sequence
  source: /note="Description of Artificial Sequence: Synthetic oligonucleotide"
atcaacacaccaggatacaca

SEQ ID NO: 32604 - DNA, 21 bp, Artificial Sequence
  source: /note="Description of Artificial Sequence: Synthetic oligonucleotide"
atcaacgtcctcagaagcgca

SEQ ID NO: 32605 - DNA, 21 bp, Artificial Sequence
  source: /note="Description of Artificial Sequence: Synthetic oligonucleotide"
atcccagcaaacagccaagtc

SEQ ID NO: 32606 - DNA, 21 bp, Artificial Sequence
  source: /note="Description of Artificial Sequence: Synthetic oligonucleotide"
atcccagcaagcagcagctgg

SEQ ID NO: 32607 - DNA, 21 bp, Artificial Sequence
  source: /note="Description of Artificial Sequence: Synthetic oligonucleotide"
atcccagacctcaaaagaaca

SEQ ID NO: 32608 - DNA, 21 bp, Artificial Sequence
  source: /note="Description of Artificial Sequence: Synthetic oligonucleotide"
atcccagaaggactcccactc

SEQ ID NO: 32609 - DNA, 21 bp, Artificial Sequence
  source: /note="Description of Artificial Sequence: Synthetic oligonucleotide"
atcccaggattcccaaaaagc

SEQ ID NO: 32610 - DNA, 21 bp, Artificial Sequence
  source: /note="Description of Artificial Sequence: Synthetic oligonucleotide"
atcccaggaacagaactccaa

SEQ ID NO: 32611 - DNA, 21 bp, Artificial Sequence
  source: /note="Description of Artificial Sequence: Synthetic oligonucleotide"
atcccacacaaccaagcatac

SEQ ID NO: 32612 - DNA, 21 bp, Artificial Sequence
  source: /note="Description of Artificial Sequence: Synthetic oligonucleotide"
atcccacacccagcaaacagc

SEQ ID NO: 32613 - DNA, 21 bp, Artificial Sequence
  source: /note="Description of Artificial Sequence: Synthetic oligonucleotide"
atcccacacacacaaacacaa

SEQ ID NO: 32614 - DNA, 21 bp, Artificial Sequence
  source: /note="Description of Artificial Sequence: Synthetic oligonucleotide"
atcccaatcggatacaaaaca

SEQ ID NO: 32615 - DNA, 21 bp, Artificial Sequence
  source: /note="Description of Artificial Sequence: Synthetic oligonucleotide"
atcccaatcaaaaacggaatg

SEQ ID NO: 32616 - DNA, 21 bp, Artificial Sequence
  source: /note="Description of Artificial Sequence: Synthetic oligonucleotide"
atcccaatcccagtcgcaatg

SEQ ID NO: 32617 - DNA, 21 bp, Artificial Sequence
  source: /note="Description of Artificial Sequence: Synthetic oligonucleotide"
atcccaaaaacaagaccagaa

SEQ ID NO: 32618 - DNA, 21 bp, Artificial Sequence
  source: /note="Description of Artificial Sequence: Synthetic oligonucleotide"
atcccactcaaagcatacgga

SEQ ID NO: 32619 - DNA, 21 bp, Artificial Sequence
  source: /note="Description of Artificial Sequence: Synthetic oligonucleotide"
atcccactcccaaacgacgga

SEQ ID NO: 32620 - DNA, 21 bp, Artificial Sequence
  source: /note="Description of Artificial Sequence: Synthetic oligonucleotide"
atcccactcacaagccacaca

SEQ ID NO: 32621 - DNA, 21 bp, Artificial Sequence
  source: /note="Description of Artificial Sequence: Synthetic oligonucleotide"
atcccaatgagcgcagcaaaa

SEQ ID NO: 32622 - DNA, 21 bp, Artificial Sequence
  source: /note="Description of Artificial Sequence: Synthetic oligonucleotide"
atcccaaacttcgtccacagc

SEQ ID NO: 32623 - DNA, 21 bp, Artificial Sequence
  source: /note="Description of Artificial Sequence: Synthetic oligonucleotide"
atcccaaaccacaaaagcatc

SEQ ID NO: 32624 - DNA, 21 bp, Artificial Sequence
  source: /note="Description of Artificial Sequence: Synthetic oligonucleotide"
atcccaaacaaaacaccattc

SEQ ID NO: 32625 - DNA, 21 bp, Artificial Sequence
  source: /note="Description of Artificial Sequence: Synthetic oligonucleotide"
atcccaaacctcaaaatcagc

SEQ ID NO: 32626 - DNA, 21 bp, Artificial Sequence
  source: /note="Description of Artificial Sequence: Synthetic oligonucleotide"
atcccaaacccaccaatggca

SEQ ID NO: 32627 - DNA, 21 bp, Artificial Sequence
  source: /note="Description of Artificial Sequence: Synthetic oligonucleotide"
atcccaaacagacacctcagc

SEQ ID NO: 32628 - DNA, 21 bp, Artificial Sequence
  source: /note="Description of Artificial Sequence: Synthetic oligonucleotide"
atcccaaacgtcagccaccaa

SEQ ID NO: 32629 - DNA, 21 bp, Artificial Sequence
  source: /note="Description of Artificial Sequence: Synthetic oligonucleotide"
atcccaaactacgcagtcagc

SEQ ID NO: 32630 - DNA, 21 bp, Artificial Sequence
  source: /note="Description of Artificial Sequence: Synthetic oligonucleotide"
atcccaccaagaagcaacagc

SEQ ID NO: 32631 - DNA, 21 bp, Artificial Sequence
  source: /note="Description of Artificial Sequence: Synthetic oligonucleotide"
atcccacaagcaagcctcatg

SEQ ID NO: 32632 - DNA, 21 bp, Artificial Sequence
  source: /note="Description of Artificial Sequence: Synthetic oligonucleotide"
atcccacaaaacagaatcctc

SEQ ID NO: 32633 - DNA, 21 bp, Artificial Sequence
  source: /note="Description of Artificial Sequence: Synthetic oligonucleotide"
atcccacaaccagtccacctc

SEQ ID NO: 32634 - DNA, 21 bp, Artificial Sequence
  source: /note="Description of Artificial Sequence: Synthetic oligonucleotide"
atcccaagagcagacgcaaga

SEQ ID NO: 32635 - DNA, 21 bp, Artificial Sequence
  source: /note="Description of Artificial Sequence: Synthetic oligonucleotide"
atcccaagattcagcacaatg

SEQ ID NO: 32636 - DNA, 21 bp, Artificial Sequence
  source: /note="Description of Artificial Sequence: Synthetic oligonucleotide"
atcccaagaccaagcgtccac

SEQ ID NO: 32637 - DNA, 21 bp, Artificial Sequence
  source: /note="Description of Artificial Sequence: Synthetic oligonucleotide"
atcccaagaagcaacatcagc

SEQ ID NO: 32638 - DNA, 21 bp, Artificial Sequence
  source: /note="Description of Artificial Sequence: Synthetic oligonucleotide"
atcccaagaacagcactccaa

SEQ ID NO: 32639 - DNA, 21 bp, Artificial Sequence
  source: /note="Description of Artificial Sequence: Synthetic oligonucleotide"
atcccaagcttcaaaagagaa

SEQ ID NO: 32640 - DNA, 21 bp, Artificial Sequence
  source: /note="Description of Artificial Sequence: Synthetic oligonucleotide"
atcccaagcttcagcaaacca

SEQ ID NO: 32641 - DNA, 21 bp, Artificial Sequence
  source: /note="Description of Artificial Sequence: Synthetic oligonucleotide"
atcccaagcaactgcaaacca

SEQ ID NO: 32642 - DNA, 21 bp, Artificial Sequence
  source: /note="Description of Artificial Sequence: Synthetic oligonucleotide"
atcccaagcccaagccacgaa

SEQ ID NO: 32643 - DNA, 21 bp, Artificial Sequence
  source: /note="Description of Artificial Sequence: Synthetic oligonucleotide"
atcccaagcagatacgcaatg

SEQ ID NO: 32644 - DNA, 21 bp, Artificial Sequence
  source: /note="Description of Artificial Sequence: Synthetic oligonucleotide"
atcccaagcgtcccagtcagc

SEQ ID NO: 32645 - DNA, 21 bp, Artificial Sequence
  source: /note="Description of Artificial Sequence: Synthetic oligonucleotide"
atcccaacaatcagccacgga

SEQ ID NO: 32646 - DNA, 21 bp, Artificial Sequence
  source: /note="Description of Artificial Sequence: Synthetic oligonucleotide"
atcccaacactcccagcaatg

SEQ ID NO: 32647 - DNA, 21 bp, Artificial Sequence
  source: /note="Description of Artificial Sequence: Synthetic oligonucleotide"
atcccaacaccaaacaacgtc

SEQ ID NO: 32648 - DNA, 21 bp, Artificial Sequence
  source: /note="Description of Artificial Sequence: Synthetic oligonucleotide"
atcccaacaacagcactcgga

SEQ ID NO: 32649 - DNA, 21 bp, Artificial Sequence
  source: /note="Description of Artificial Sequence: Synthetic oligonucleotide"
atcccagtcttcagaagcgaa

SEQ ID NO: 32650 - DNA, 21 bp, Artificial Sequence
  source: /note="Description of Artificial Sequence: Synthetic oligonucleotide"
atcccagtcggacaatacaac

SEQ ID NO: 32651 - DNA, 21 bp, Artificial Sequence
  source: /note="Description of Artificial Sequence: Synthetic oligonucleotide"
atcccagtcagactcacacaa

SEQ ID NO: 32652 - DNA, 21 bp, Artificial Sequence
  source: /note="Description of Artificial Sequence: Synthetic oligonucleotide"
atcccatacatgctcgaccca

SEQ ID NO: 32653 - DNA, 21 bp, Artificial Sequence
  source: /note="Description of Artificial Sequence: Synthetic oligonucleotide"
atccaagcagtcagcagcctc

SEQ ID NO: 32654 - DNA, 21 bp, Artificial Sequence
  source: /note="Description of Artificial Sequence: Synthetic oligonucleotide"
atccaagacgaaacagtcagc

SEQ ID NO: 32655 - DNA, 21 bp, Artificial Sequence
  source: /note="Description of Artificial Sequence: Synthetic oligonucleotide"
atccaagaaagcgcaagaatg

SEQ ID NO: 32656 - DNA, 21 bp, Artificial Sequence
  source: /note="Description of Artificial Sequence: Synthetic oligonucleotide"
atccaattcagaagcgcaaca

SEQ ID NO: 32657 - DNA, 21 bp, Artificial Sequence
  source: /note="Description of Artificial Sequence: Synthetic oligonucleotide"
atccaattcgtcccagtcgac

SEQ ID NO: 32658 - DNA, 21 bp, Artificial Sequence
  source: /note="Description of Artificial Sequence: Synthetic oligonucleotide"
atccaaggactcagcgcactc

SEQ ID NO: 32659 - DNA, 21 bp, Artificial Sequence
  source: /note="Description of Artificial Sequence: Synthetic oligonucleotide"
atccaaggaagactcacaaca

SEQ ID NO: 32660 - DNA, 21 bp, Artificial Sequence
  source: /note="Description of Artificial Sequence: Synthetic oligonucleotide"
atccaacaccaaccactcaca

SEQ ID NO: 32661 - DNA, 21 bp, Artificial Sequence
  source: /note="Description of Artificial Sequence: Synthetic oligonucleotide"
atccaaatcaaaagcctcaac

SEQ ID NO: 32662 - DNA, 21 bp, Artificial Sequence
  source: /note="Description of Artificial Sequence: Synthetic oligonucleotide"
atccaaatccaagaaagaaga

SEQ ID NO: 32663 - DNA, 21 bp, Artificial Sequence
  source: /note="Description of Artificial Sequence: Synthetic oligonucleotide"
atccaactcaaaagcacagtc

SEQ ID NO: 32664 - DNA, 21 bp, Artificial Sequence
  source: /note="Description of Artificial Sequence: Synthetic oligonucleotide"
atccaactcagaatcaacgca

SEQ ID NO: 32665 - DNA, 21 bp, Artificial Sequence
  source: /note="Description of Artificial Sequence: Synthetic oligonucleotide"
atccaactcagcgcagcaagc

SEQ ID NO: 32666 - DNA, 21 bp, Artificial Sequence
  source: /note="Description of Artificial Sequence: Synthetic oligonucleotide"
atccaaaacggataccaattc

SEQ ID NO: 32667 - DNA, 21 bp, Artificial Sequence
  source: /note="Description of Artificial Sequence: Synthetic oligonucleotide"
atccaaaaccaccaccaactc

SEQ ID NO: 32668 - DNA, 21 bp, Artificial Sequence
  source: /note="Description of Artificial Sequence: Synthetic oligonucleotide"
atccaaaacacaccaccaaca

SEQ ID NO: 32669 - DNA, 21 bp, Artificial Sequence
  source: /note="Description of Artificial Sequence: Synthetic oligonucleotide"
atccaaaacgtcccactccac

SEQ ID NO: 32670 - DNA, 21 bp, Artificial Sequence
  source: /note="Description of Artificial Sequence: Synthetic oligonucleotide"
atccaaagaccaagcgacatc

SEQ ID NO: 32671 - DNA, 21 bp, Artificial Sequence
  source: /note="Description of Artificial Sequence: Synthetic oligonucleotide"
atccaaagaagcgtcgaagca

SEQ ID NO: 32672 - DNA, 21 bp, Artificial Sequence
  source: /note="Description of Artificial Sequence: Synthetic oligonucleotide"
atccaaagagtcgcacaagga

SEQ ID NO: 32673 - DNA, 21 bp, Artificial Sequence
  source: /note="Description of Artificial Sequence: Synthetic oligonucleotide"
atccaaagcatcaacctccca

SEQ ID NO: 32674 - DNA, 21 bp, Artificial Sequence
  source: /note="Description of Artificial Sequence: Synthetic oligonucleotide"
atccaaagcccactcctcgca

SEQ ID NO: 32675 - DNA, 21 bp, Artificial Sequence
  source: /note="Description of Artificial Sequence: Synthetic oligonucleotide"
atccaaagcacaagactcgtc

SEQ ID NO: 32676 - DNA, 21 bp, Artificial Sequence
  source: /note="Description of Artificial Sequence: Synthetic oligonucleotide"
atccaaagctacaacacactc

SEQ ID NO: 32677 - DNA, 21 bp, Artificial Sequence
  source: /note="Description of Artificial Sequence: Synthetic oligonucleotide"
atccaaacaagaagcgacatg

SEQ ID NO: 32678 - DNA, 21 bp, Artificial Sequence
  source: /note="Description of Artificial Sequence: Synthetic oligonucleotide"
atccaaacagtcagcgcagtc

SEQ ID NO: 32679 - DNA, 21 bp, Artificial Sequence
  source: /note="Description of Artificial Sequence: Synthetic oligonucleotide"
atcagagcactcgcaggacac

SEQ ID NO: 32680 - DNA, 21 bp, Artificial Sequence
  source: /note="Description of Artificial Sequence: Synthetic oligonucleotide"
atcagagcaagccaaacaatc

SEQ ID NO: 32681 - DNA, 21 bp, Artificial Sequence
  source: /note="Description of Artificial Sequence: Synthetic oligonucleotide"
atcagagcaacaagcagcgaa

SEQ ID NO: 32682 - DNA, 21 bp, Artificial Sequence
  source: /note="Description of Artificial Sequence: Synthetic oligonucleotide"
atcagagacgtccacgtcgtc

SEQ ID NO: 32683 - DNA, 21 bp, Artificial Sequence
  source: /note="Description of Artificial Sequence: Synthetic oligonucleotide"
atcagagaaccaacagcaatg

SEQ ID NO: 32684 - DNA, 21 bp, Artificial Sequence
  source: /note="Description of Artificial Sequence: Synthetic oligonucleotide"
atcagaggagcactcggaatc

SEQ ID NO: 32685 - DNA, 21 bp, Artificial Sequence
  source: /note="Description of Artificial Sequence: Synthetic oligonucleotide"
atcagaggaaacttcctcagc

SEQ ID NO: 32686 - DNA, 21 bp, Artificial Sequence
  source: /note="Description of Artificial Sequence: Synthetic oligonucleotide"
atcagaggaacaccagcattc

SEQ ID NO: 32687 - DNA, 21 bp, Artificial Sequence
  source: /note="Description of Artificial Sequence: Synthetic oligonucleotide"
atcagacacggaatcgcagca

SEQ ID NO: 32688 - DNA, 21 bp, Artificial Sequence
  source: /note="Description of Artificial Sequence: Synthetic oligonucleotide"
atcagaatcccagaactccca

SEQ ID NO: 32689 - DNA, 21 bp, Artificial Sequence
  source: /note="Description of Artificial Sequence: Synthetic oligonucleotide"
atcagaatcccaatgacacca

SEQ ID NO: 32690 - DNA, 21 bp, Artificial Sequence
  source: /note="Description of Artificial Sequence: Synthetic oligonucleotide"
atcagaaaaagcccaaacgaa

SEQ ID NO: 32691 - DNA, 21 bp, Artificial Sequence
  source: /note="Description of Artificial Sequence: Synthetic oligonucleotide"
atcagactcgaatacagcgca

SEQ ID NO: 32692 - DNA, 21 bp, Artificial Sequence
  source: /note="Description of Artificial Sequence: Synthetic oligonucleotide"
atcagactcggaagcttcgca

SEQ ID NO: 32693 - DNA, 21 bp, Artificial Sequence
  source: /note="Description of Artificial Sequence: Synthetic oligonucleotide"
atcagactccaaaacagcatc

SEQ ID NO: 32694 - DNA, 21 bp, Artificial Sequence
  source: /note="Description of Artificial Sequence: Synthetic oligonucleotide"
atcagactcagcgacaaagca

SEQ ID NO: 32695 - DNA, 21 bp, Artificial Sequence
  source: /note="Description of Artificial Sequence: Synthetic oligonucleotide"
atcagaatgagcacacaactc

SEQ ID NO: 32696 - DNA, 21 bp, Artificial Sequence
  source: /note="Description of Artificial Sequence: Synthetic oligonucleotide"
atcagaaacggaagcgacgac

SEQ ID NO: 32697 - DNA, 21 bp, Artificial Sequence
  source: /note="Description of Artificial Sequence: Synthetic oligonucleotide"
atcagaaacatcatcgacttc

SEQ ID NO: 32698 - DNA, 21 bp, Artificial Sequence
  source: /note="Description of Artificial Sequence: Synthetic oligonucleotide"
atcagaccactcaacatgcca

SEQ ID NO: 32699 - DNA, 21 bp, Artificial Sequence
  source: /note="Description of Artificial Sequence: Synthetic oligonucleotide"
atcagaccaacagaaggaatg

SEQ ID NO: 32700 - DNA, 21 bp, Artificial Sequence
  source: /note="Description of Artificial Sequence: Synthetic oligonucleotide"
atcagacaagaatgcagaatc

SEQ ID NO: 32701 - DNA, 21 bp, Artificial Sequence
  source: /note="Description of Artificial Sequence: Synthetic oligonucleotide"
atcagacaaatcccatacgca

SEQ ID NO: 32702 - DNA, 21 bp, Artificial Sequence
  source: /note="Description of Artificial Sequence: Synthetic oligonucleotide"
atcagacaaagcagcgtcaac

SEQ ID NO: 32703 - DNA, 21 bp, Artificial Sequence
  source: /note="Description of Artificial Sequence: Synthetic oligonucleotide"
atcagaagcggacaaccactc

SEQ ID NO: 32704 - DNA, 21 bp, Artificial Sequence
  source: /note="Description of Artificial Sequence: Synthetic oligonucleotide"
atcagaagcatcacagacaca

SEQ ID NO: 32705 - DNA, 21 bp, Artificial Sequence
  source: /note="Description of Artificial Sequence: Synthetic oligonucleotide"
atcagaagcctcgcaacagca

SEQ ID NO: 32706 - DNA, 21 bp, Artificial Sequence
  source: /note="Description of Artificial Sequence: Synthetic oligonucleotide"
atcagaagcccactcccaagc

SEQ ID NO: 32707 - DNA, 21 bp, Artificial Sequence
  source: /note="Description of Artificial Sequence: Synthetic oligonucleotide"
atcagaagcagcggaatgatg

SEQ ID NO: 32708 - DNA, 21 bp, Artificial Sequence
  source: /note="Description of Artificial Sequence: Synthetic oligonucleotide"
atcagaagcagcccaccaaca

SEQ ID NO: 32709 - DNA, 21 bp, Artificial Sequence
  source: /note="Description of Artificial Sequence: Synthetic oligonucleotide"
atcagaagcgtcagcgaagtc

SEQ ID NO: 32710 - DNA, 21 bp, Artificial Sequence
  source: /note="Description of Artificial Sequence: Synthetic oligonucleotide"
atcagaacactcggaagcaca

SEQ ID NO: 32711 - DNA, 21 bp, Artificial Sequence
  source: /note="Description of Artificial Sequence: Synthetic oligonucleotide"
atcagaacaacagcagcattc

SEQ ID NO: 32712 - DNA, 21 bp, Artificial Sequence
  source: /note="Description of Artificial Sequence: Synthetic oligonucleotide"
atcagagtcgaaaacgaactc

SEQ ID NO: 32713 - DNA, 21 bp, Artificial Sequence
  source: /note="Description of Artificial Sequence: Synthetic oligonucleotide"
atcagagtcaacgacacagga

SEQ ID NO: 32714 - DNA, 21 bp, Artificial Sequence
  source: /note="Description of Artificial Sequence: Synthetic oligonucleotide"
atcagagtcccaacaagcagc

SEQ ID NO: 32715 - DNA, 21 bp, Artificial Sequence
  source: /note="Description of Artificial Sequence: Synthetic oligonucleotide"
atcagagtcagcgcaatccac

SEQ ID NO: 32716 - DNA, 21 bp, Artificial Sequence
  source: /note="Description of Artificial Sequence: Synthetic oligonucleotide"
atcagcgcagcaagcagagca

SEQ ID NO: 32717 - DNA, 21 bp, Artificial Sequence
  source: /note="Description of Artificial Sequence: Synthetic oligonucleotide"
atcagcgcagcagtcatggca

SEQ ID NO: 32718 - DNA, 21 bp, Artificial Sequence
  source: /note="Description of Artificial Sequence: Synthetic oligonucleotide"
atcagcgcaggaccaatgcca

SEQ ID NO: 32719 - DNA, 21 bp, Artificial Sequence
  source: /note="Description of Artificial Sequence: Synthetic oligonucleotide"
atcagcgcaatcagcgcacaa

SEQ ID NO: 32720 - DNA, 21 bp, Artificial Sequence
  source: /note="Description of Artificial Sequence: Synthetic oligonucleotide"
atcagcgcaaacatgttcagc

SEQ ID NO: 32721 - DNA, 21 bp, Artificial Sequence
  source: /note="Description of Artificial Sequence: Synthetic oligonucleotide"
atcagcgcaagaccaacaatc

SEQ ID NO: 32722 - DNA, 21 bp, Artificial Sequence
  source: /note="Description of Artificial Sequence: Synthetic oligonucleotide"
atcagcgcaagccacagcagc

SEQ ID NO: 32723 - DNA, 21 bp, Artificial Sequence
  source: /note="Description of Artificial Sequence: Synthetic oligonucleotide"
atcagcgcaacaacaagcagc

SEQ ID NO: 32724 - DNA, 21 bp, Artificial Sequence
  source: /note="Description of Artificial Sequence: Synthetic oligonucleotide"
atcagcgaccaacaatacaca

SEQ ID NO: 32725 - DNA, 21 bp, Artificial Sequence
  source: /note="Description of Artificial Sequence: Synthetic oligonucleotide"
atcagcgaatgcgtcggagga

SEQ ID NO: 32726 - DNA, 21 bp, Artificial Sequence
  source: /note="Description of Artificial Sequence: Synthetic oligonucleotide"
atcagcgaacacatcatgagc

SEQ ID NO: 32727 - DNA, 21 bp, Artificial Sequence
  source: /note="Description of Artificial Sequence: Synthetic oligonucleotide"
atcagcgaaccaacaagcgtc

SEQ ID NO: 32728 - DNA, 21 bp, Artificial Sequence
  source: /note="Description of Artificial Sequence: Synthetic oligonucleotide"
atcagcgaaagcagcagatac

SEQ ID NO: 32729 - DNA, 21 bp, Artificial Sequence
  source: /note="Description of Artificial Sequence: Synthetic oligonucleotide"
atcagcttcagaatcgaaaac

SEQ ID NO: 32730 - DNA, 21 bp, Artificial Sequence
  source: /note="Description of Artificial Sequence: Synthetic oligonucleotide"
atcagcggagcagtcgacaga

SEQ ID NO: 32731 - DNA, 21 bp, Artificial Sequence
  source: /note="Description of Artificial Sequence: Synthetic oligonucleotide"
atcagcggaaaactcgcaaca

SEQ ID NO: 32732 - DNA, 21 bp, Artificial Sequence
  source: /note="Description of Artificial Sequence: Synthetic oligonucleotide"
atcagcggaaacccaaacgca

SEQ ID NO: 32733 - DNA, 21 bp, Artificial Sequence
  source: /note="Description of Artificial Sequence: Synthetic oligonucleotide"
atcagcggaccaccaacacca

SEQ ID NO: 32734 - DNA, 21 bp, Artificial Sequence
  source: /note="Description of Artificial Sequence: Synthetic oligonucleotide"
atcagcggaagaaacgcaaca

SEQ ID NO: 32735 - DNA, 21 bp, Artificial Sequence
  source: /note="Description of Artificial Sequence: Synthetic oligonucleotide"
atcagccacagcgacaacgca

SEQ ID NO: 32736 - DNA, 21 bp, Artificial Sequence
  source: /note="Description of Artificial Sequence: Synthetic oligonucleotide"
atcagcatccaactcagagac

SEQ ID NO: 32737 - DNA, 21 bp, Artificial Sequence
  source: /note="Description of Artificial Sequence: Synthetic oligonucleotide"
atcagcatcagaacaggacca

SEQ ID NO: 32738 - DNA, 21 bp, Artificial Sequence
  source: /note="Description of Artificial Sequence: Synthetic oligonucleotide"
atcagcaaagcagaagcaatc

SEQ ID NO: 32739 - DNA, 21 bp, Artificial Sequence
  source: /note="Description of Artificial Sequence: Synthetic oligonucleotide"
atcagcaaagcatacccaaac

SEQ ID NO: 32740 - DNA, 21 bp, Artificial Sequence
  source: /note="Description of Artificial Sequence: Synthetic oligonucleotide"
atcagcaaagacggagcagtc

SEQ ID NO: 32741 - DNA, 21 bp, Artificial Sequence
  source: /note="Description of Artificial Sequence: Synthetic oligonucleotide"
atcagcaaagacaacgcactc

SEQ ID NO: 32742 - DNA, 21 bp, Artificial Sequence
  source: /note="Description of Artificial Sequence: Synthetic oligonucleotide"
atcagcaaactcaacggacca

SEQ ID NO: 32743 - DNA, 21 bp, Artificial Sequence
  source: /note="Description of Artificial Sequence: Synthetic oligonucleotide"
atcagcaaaagctacaacgga

SEQ ID NO: 32744 - DNA, 21 bp, Artificial Sequence
  source: /note="Description of Artificial Sequence: Synthetic oligonucleotide"
atcagcctcgacagacacagc

SEQ ID NO: 32745 - DNA, 21 bp, Artificial Sequence
  source: /note="Description of Artificial Sequence: Synthetic oligonucleotide"
atcagcctcctcagaaacaca

SEQ ID NO: 32746 - DNA, 21 bp, Artificial Sequence
  source: /note="Description of Artificial Sequence: Synthetic oligonucleotide"
atcagcctccaaacaagcctc

SEQ ID NO: 32747 - DNA, 21 bp, Artificial Sequence
  source: /note="Description of Artificial Sequence: Synthetic oligonucleotide"
atcagcctcagattcaacgac

SEQ ID NO: 32748 - DNA, 21 bp, Artificial Sequence
  source: /note="Description of Artificial Sequence: Synthetic oligonucleotide"
atcagcctcagcgcactcgca

SEQ ID NO: 32749 - DNA, 21 bp, Artificial Sequence
  source: /note="Description of Artificial Sequence: Synthetic oligonucleotide"
atcagcatgaaaccaatcagc

SEQ ID NO: 32750 - DNA, 21 bp, Artificial Sequence
  source: /note="Description of Artificial Sequence: Synthetic oligonucleotide"
atcagcatgctcagaccaaca

SEQ ID NO: 32751 - DNA, 21 bp, Artificial Sequence
  source: /note="Description of Artificial Sequence: Synthetic oligonucleotide"
atcagcatgacagtccacagc

SEQ ID NO: 32752 - DNA, 21 bp, Artificial Sequence
  source: /note="Description of Artificial Sequence: Synthetic oligonucleotide"
atcagcatggtcagacaagga

SEQ ID NO: 32753 - DNA, 21 bp, Artificial Sequence
  source: /note="Description of Artificial Sequence: Synthetic oligonucleotide"
atcagcaacgcaatgacacaa

SEQ ID NO: 32754 - DNA, 21 bp, Artificial Sequence
  source: /note="Description of Artificial Sequence: Synthetic oligonucleotide"
atcagcaacggaagagcagtc

SEQ ID NO: 32755 - DNA, 21 bp, Artificial Sequence
  source: /note="Description of Artificial Sequence: Synthetic oligonucleotide"
atcagcaacagcagaagcaca

SEQ ID NO: 32756 - DNA, 21 bp, Artificial Sequence
  source: /note="Description of Artificial Sequence: Synthetic oligonucleotide"
atcagcaacagcagcccaagc

SEQ ID NO: 32757 - DNA, 21 bp, Artificial Sequence
  source: /note="Description of Artificial Sequence: Synthetic oligonucleotide"
atcagcaacgtccaactcgca

SEQ ID NO: 32758 - DNA, 21 bp, Artificial Sequence
  source: /note="Description of Artificial Sequence: Synthetic oligonucleotide"
atcagcccagcaccattccca

SEQ ID NO: 32759 - DNA, 21 bp, Artificial Sequence
  source: /note="Description of Artificial Sequence: Synthetic oligonucleotide"
atcagcccagacccaatgctc

SEQ ID NO: 32760 - DNA, 21 bp, Artificial Sequence
  source: /note="Description of Artificial Sequence: Synthetic oligonucleotide"
atcagcccattcacagtcgaa

SEQ ID NO: 32761 - DNA, 21 bp, Artificial Sequence
  source: /note="Description of Artificial Sequence: Synthetic oligonucleotide"
atcagcccaagagacgtcagc

SEQ ID NO: 32762 - DNA, 21 bp, Artificial Sequence
  source: /note="Description of Artificial Sequence: Synthetic oligonucleotide"
atcagcccaagaaaagcaaca

SEQ ID NO: 32763 - DNA, 21 bp, Artificial Sequence
  source: /note="Description of Artificial Sequence: Synthetic oligonucleotide"
atcagcccaagaaacaacagc

SEQ ID NO: 32764 - DNA, 21 bp, Artificial Sequence
  source: /note="Description of Artificial Sequence: Synthetic oligonucleotide"
atcagcccaagatacccacac

SEQ ID NO: 32765 - DNA, 21 bp, Artificial Sequence
  source: /note="Description of Artificial Sequence: Synthetic oligonucleotide"
atcagcccaagcggaccagca

SEQ ID NO: 32766 - DNA, 21 bp, Artificial Sequence
  source: /note="Description of Artificial Sequence: Synthetic oligonucleotide"
atcagcccagtcagaaacgtc

SEQ ID NO: 32767 - DNA, 21 bp, Artificial Sequence
  source: /note="Description of Artificial Sequence: Synthetic oligonucleotide"
atcagcccatacgaaaacgca

SEQ ID NO: 32768 - DNA, 21 bp, Artificial Sequence
  source: /note="Description of Artificial Sequence: Synthetic oligonucleotide"
atcagcccatacagagtcagc

SEQ ID NO: 32769 - DNA, 21 bp, Artificial Sequence
  source: /note="Description of Artificial Sequence: Synthetic oligonucleotide"
atcagccaacaaagactcaaa

SEQ ID NO: 32770 - DNA, 21 bp, Artificial Sequence
  source: /note="Description of Artificial Sequence: Synthetic oligonucleotide"
atcagccaaagatggccagac

SEQ ID NO: 32771 - DNA, 21 bp, Artificial Sequence
  source: /note="Description of Artificial Sequence: Synthetic oligonucleotide"
atcagccaaacaagatacgac

SEQ ID NO: 32772 - DNA, 21 bp, Artificial Sequence
  source: /note="Description of Artificial Sequence: Synthetic oligonucleotide"
atcagcagagacacagtcatg

SEQ ID NO: 32773 - DNA, 21 bp, Artificial Sequence
  source: /note="Description of Artificial Sequence: Synthetic oligonucleotide"
atcagcagactcgtcagcagc

SEQ ID NO: 32774 - DNA, 21 bp, Artificial Sequence
  source: /note="Description of Artificial Sequence: Synthetic oligonucleotide"
atcagcagaagcaacatcatc

SEQ ID NO: 32775 - DNA, 21 bp, Artificial Sequence
  source: /note="Description of Artificial Sequence: Synthetic oligonucleotide"
atcagcagagtcgtcacaatg

SEQ ID NO: 32776 - DNA, 21 bp, Artificial Sequence
  source: /note="Description of Artificial Sequence: Synthetic oligonucleotide"
atcagcagcgcattcgcacca

SEQ ID NO: 32777 - DNA, 21 bp, Artificial Sequence
  source: /note="Description of Artificial Sequence: Synthetic oligonucleotide"
atcagcagccactgcatggca

SEQ ID NO: 32778 - DNA, 21 bp, Artificial Sequence
  source: /note="Description of Artificial Sequence: Synthetic oligonucleotide"
atcagcagcaaactcgtcagc

SEQ ID NO: 32779 - DNA, 21 bp, Artificial Sequence
  source: /note="Description of Artificial Sequence: Synthetic oligonucleotide"
atcagcagcaacccaacagtc

SEQ ID NO: 32780 - DNA, 21 bp, Artificial Sequence
  source: /note="Description of Artificial Sequence: Synthetic oligonucleotide"
atcagcagcagcgcaacactc

SEQ ID NO: 32781 - DNA, 21 bp, Artificial Sequence
  source: /note="Description of Artificial Sequence: Synthetic oligonucleotide"
atcagcagcacaaacacagca

SEQ ID NO: 32782 - DNA, 21 bp, Artificial Sequence
  source: /note="Description of Artificial Sequence: Synthetic oligonucleotide"
atcagcagcacagtcgaaatc

SEQ ID NO: 32783 - DNA, 21 bp, Artificial Sequence
  source: /note="Description of Artificial Sequence: Synthetic oligonucleotide"
atcagcagcgtccaaaaccca

SEQ ID NO: 32784 - DNA, 21 bp, Artificial Sequence
  source: /note="Description of Artificial Sequence: Synthetic oligonucleotide"
atcagcacacacctcaaaagc

SEQ ID NO: 32785 - DNA, 21 bp, Artificial Sequence
  source: /note="Description of Artificial Sequence: Synthetic oligonucleotide"
atcagcacacacacaaaaagc

SEQ ID NO: 32786 - DNA, 21 bp, Artificial Sequence
  source: /note="Description of Artificial Sequence: Synthetic oligonucleotide"
atcagcacaaacgtcagaagc

SEQ ID NO: 32787 - DNA, 21 bp, Artificial Sequence
  source: /note="Description of Artificial Sequence: Synthetic oligonucleotide"
atcagcacaagaaacccagaa

SEQ ID NO: 32788 - DNA, 21 bp, Artificial Sequence
  source: /note="Description of Artificial Sequence: Synthetic oligonucleotide"
atcagcacaagccaacaacac

SEQ ID NO: 32789 - DNA, 21 bp, Artificial Sequence
  source: /note="Description of Artificial Sequence: Synthetic oligonucleotide"
atcagcacaacaacagtccca

SEQ ID NO: 32790 - DNA, 21 bp, Artificial Sequence
  source: /note="Description of Artificial Sequence: Synthetic oligonucleotide"
atcagcacagtcctcgtcgac

SEQ ID NO: 32791 - DNA, 21 bp, Artificial Sequence
  source: /note="Description of Artificial Sequence: Synthetic oligonucleotide"
atcagcacatgggaatacgaa

SEQ ID NO: 32792 - DNA, 21 bp, Artificial Sequence
  source: /note="Description of Artificial Sequence: Synthetic oligonucleotide"
atcagcacatggagaccaaca

SEQ ID NO: 32793 - DNA, 21 bp, Artificial Sequence
  source: /note="Description of Artificial Sequence: Synthetic oligonucleotide"
atcagcgtcaaaggacaacca

SEQ ID NO: 32794 - DNA, 21 bp, Artificial Sequence
  source: /note="Description of Artificial Sequence: Synthetic oligonucleotide"
atcagcgtcagccaaacagac

SEQ ID NO: 32795 - DNA, 21 bp, Artificial Sequence
  source: /note="Description of Artificial Sequence: Synthetic oligonucleotide"
atcagcgtcacaagcagcagc

SEQ ID NO: 32796 - DNA, 21 bp, Artificial Sequence
  source: /note="Description of Artificial Sequence: Synthetic oligonucleotide"
atcagctacggaacaagaagc

SEQ ID NO: 32797 - DNA, 21 bp, Artificial Sequence
  source: /note="Description of Artificial Sequence: Synthetic oligonucleotide"
atcagctacaacgcaaaagtc

SEQ ID NO: 32798 - DNA, 21 bp, Artificial Sequence
  source: /note="Description of Artificial Sequence: Synthetic oligonucleotide"
atcagctacccaaaaccagtc

SEQ ID NO: 32799 - DNA, 21 bp, Artificial Sequence
  source: /note="Description of Artificial Sequence: Synthetic oligonucleotide"
atcacagcaccacacagcatg

SEQ ID NO: 32800 - DNA, 21 bp, Artificial Sequence
  source: /note="Description of Artificial Sequence: Synthetic oligonucleotide"
atcacagcaagagtcaacgca

SEQ ID NO: 32801 - DNA, 21 bp, Artificial Sequence
  source: /note="Description of Artificial Sequence: Synthetic oligonucleotide"
atcacagcaagatacccaaca

SEQ ID NO: 32802 - DNA, 21 bp, Artificial Sequence
  source: /note="Description of Artificial Sequence: Synthetic oligonucleotide"
atcacagcaagcggactcgtc

SEQ ID NO: 32803 - DNA, 21 bp, Artificial Sequence
  source: /note="Description of Artificial Sequence: Synthetic oligonucleotide"
atcacagcaacacaaagaatg

SEQ ID NO: 32804 - DNA, 21 bp, Artificial Sequence
  source: /note="Description of Artificial Sequence: Synthetic oligonucleotide"
atcacagacgcagcaaaccca

SEQ ID NO: 32805 - DNA, 21 bp, Artificial Sequence
  source: /note="Description of Artificial Sequence: Synthetic oligonucleotide"
atcacagacagagtcgcaatc

SEQ ID NO: 32806 - DNA, 21 bp, Artificial Sequence
  source: /note="Description of Artificial Sequence: Synthetic oligonucleotide"
atcacagaaagaagctgcaca

SEQ ID NO: 32807 - DNA, 21 bp, Artificial Sequence
  source: /note="Description of Artificial Sequence: Synthetic oligonucleotide"
atcacagaagtcaaaagagga

SEQ ID NO: 32808 - DNA, 21 bp, Artificial Sequence
  source: /note="Description of Artificial Sequence: Synthetic oligonucleotide"
atcacattcgaccacgtcaca

SEQ ID NO: 32809 - DNA, 21 bp, Artificial Sequence
  source: /note="Description of Artificial Sequence: Synthetic oligonucleotide"
atcacattcagcggaagcagc

SEQ ID NO: 32810 - DNA, 21 bp, Artificial Sequence
  source: /note="Description of Artificial Sequence: Synthetic oligonucleotide"
atcacaggagacctcaacgga

SEQ ID NO: 32811 - DNA, 21 bp, Artificial Sequence
  source: /note="Description of Artificial Sequence: Synthetic oligonucleotide"
atcacaggaggaagaccagga

SEQ ID NO: 32812 - DNA, 21 bp, Artificial Sequence
  source: /note="Description of Artificial Sequence: Synthetic oligonucleotide"
atcacaggaaacagaacacca

SEQ ID NO: 32813 - DNA, 21 bp, Artificial Sequence
  source: /note="Description of Artificial Sequence: Synthetic oligonucleotide"
atcacaggaagcaacagagac

SEQ ID NO: 32814 - DNA, 21 bp, Artificial Sequence
  source: /note="Description of Artificial Sequence: Synthetic oligonucleotide"
atcacacacgcaagcagcgac

SEQ ID NO: 32815 - DNA, 21 bp, Artificial Sequence
  source: /note="Description of Artificial Sequence: Synthetic oligonucleotide"
atcacacacatcagactcgac

SEQ ID NO: 32816 - DNA, 21 bp, Artificial Sequence
  source: /note="Description of Artificial Sequence: Synthetic oligonucleotide"
atcacacacagcatccaaaga

SEQ ID NO: 32817 - DNA, 21 bp, Artificial Sequence
  source: /note="Description of Artificial Sequence: Synthetic oligonucleotide"
atcacactcggaagcacagga

SEQ ID NO: 32818 - DNA, 21 bp, Artificial Sequence
  source: /note="Description of Artificial Sequence: Synthetic oligonucleotide"
atcacactcagcagccaagga

SEQ ID NO: 32819 - DNA, 21 bp, Artificial Sequence
  source: /note="Description of Artificial Sequence: Synthetic oligonucleotide"
atcacactctacccaaacagc

SEQ ID NO: 32820 - DNA, 21 bp, Artificial Sequence
  source: /note="Description of Artificial Sequence: Synthetic oligonucleotide"
atcacaatgctcgcaggagac

SEQ ID NO: 32821 - DNA, 21 bp, Artificial Sequence
  source: /note="Description of Artificial Sequence: Synthetic oligonucleotide"
atcacaaacgacagaacagtc

SEQ ID NO: 32822 - DNA, 21 bp, Artificial Sequence
  source: /note="Description of Artificial Sequence: Synthetic oligonucleotide"
atcacaaacgaaccaccaaga

SEQ ID NO: 32823 - DNA, 21 bp, Artificial Sequence
  source: /note="Description of Artificial Sequence: Synthetic oligonucleotide"
atcacaccactcacagcagga

SEQ ID NO: 32824 - DNA, 21 bp, Artificial Sequence
  source: /note="Description of Artificial Sequence: Synthetic oligonucleotide"
atcacaccaatgagcatcgtc

SEQ ID NO: 32825 - DNA, 21 bp, Artificial Sequence
  source: /note="Description of Artificial Sequence: Synthetic oligonucleotide"
atcacaccaagccacggaagc

SEQ ID NO: 32826 - DNA, 21 bp, Artificial Sequence
  source: /note="Description of Artificial Sequence: Synthetic oligonucleotide"
atcacaccagtccacgcagaa

SEQ ID NO: 32827 - DNA, 21 bp, Artificial Sequence
  source: /note="Description of Artificial Sequence: Synthetic oligonucleotide"
atcacaccatacgtcagagga

SEQ ID NO: 32828 - DNA, 21 bp, Artificial Sequence
  source: /note="Description of Artificial Sequence: Synthetic oligonucleotide"
atcacacaaccacacgcaaaa

SEQ ID NO: 32829 - DNA, 21 bp, Artificial Sequence
  source: /note="Description of Artificial Sequence: Synthetic oligonucleotide"
atcacaagactcaaactcgac

SEQ ID NO: 32830 - DNA, 21 bp, Artificial Sequence
  source: /note="Description of Artificial Sequence: Synthetic oligonucleotide"
atcacaagaagcgtcgcacca

SEQ ID NO: 32831 - DNA, 21 bp, Artificial Sequence
  source: /note="Description of Artificial Sequence: Synthetic oligonucleotide"
atcacaagcgcagacccacaa

SEQ ID NO: 32832 - DNA, 21 bp, Artificial Sequence
  source: /note="Description of Artificial Sequence: Synthetic oligonucleotide"
atcacaagcaaaacacaagca

SEQ ID NO: 32833 - DNA, 21 bp, Artificial Sequence
  source: /note="Description of Artificial Sequence: Synthetic oligonucleotide"
atcacaagcccaagactccaa

SEQ ID NO: 32834 - DNA, 21 bp, Artificial Sequence
  source: /note="Description of Artificial Sequence: Synthetic oligonucleotide"
atcacaagcacactcccacca

SEQ ID NO: 32835 - DNA, 21 bp, Artificial Sequence
  source: /note="Description of Artificial Sequence: Synthetic oligonucleotide"
atcacaagcacaagagcaagc

SEQ ID NO: 32836 - DNA, 21 bp, Artificial Sequence
  source: /note="Description of Artificial Sequence: Synthetic oligonucleotide"
atcacaagcgtcgacagactc

SEQ ID NO: 32837 - DNA, 21 bp, Artificial Sequence
  source: /note="Description of Artificial Sequence: Synthetic oligonucleotide"
atcacaagcgtcccagtcagc

SEQ ID NO: 32838 - DNA, 21 bp, Artificial Sequence
  source: /note="Description of Artificial Sequence: Synthetic oligonucleotide"
atcacaacaaaatacagccaa

SEQ ID NO: 32839 - DNA, 21 bp, Artificial Sequence
  source: /note="Description of Artificial Sequence: Synthetic oligonucleotide"
atcacaacactcggaccaaca

SEQ ID NO: 32840 - DNA, 21 bp, Artificial Sequence
  source: /note="Description of Artificial Sequence: Synthetic oligonucleotide"
atcacaacaaacagcggaaga

SEQ ID NO: 32841 - DNA, 21 bp, Artificial Sequence
  source: /note="Description of Artificial Sequence: Synthetic oligonucleotide"
atcacaacaccagcagaacaa

SEQ ID NO: 32842 - DNA, 21 bp, Artificial Sequence
  source: /note="Description of Artificial Sequence: Synthetic oligonucleotide"
atcacaacaagagaaacaaca

SEQ ID NO: 32843 - DNA, 21 bp, Artificial Sequence
  source: /note="Description of Artificial Sequence: Synthetic oligonucleotide"
atcacaacaagcgacagagca

SEQ ID NO: 32844 - DNA, 21 bp, Artificial Sequence
  source: /note="Description of Artificial Sequence: Synthetic oligonucleotide"
atcacaacatacaacgaaaac

SEQ ID NO: 32845 - DNA, 21 bp, Artificial Sequence
  source: /note="Description of Artificial Sequence: Synthetic oligonucleotide"
atcacagtcccacaccactac

SEQ ID NO: 32846 - DNA, 21 bp, Artificial Sequence
  source: /note="Description of Artificial Sequence: Synthetic oligonucleotide"
atcacagtcagcagagcagac

SEQ ID NO: 32847 - DNA, 21 bp, Artificial Sequence
  source: /note="Description of Artificial Sequence: Synthetic oligonucleotide"
atcacataccaaaacgcagaa

SEQ ID NO: 32848 - DNA, 21 bp, Artificial Sequence
  source: /note="Description of Artificial Sequence: Synthetic oligonucleotide"
atcgtcgcaacatgcacagca

SEQ ID NO: 32849 - DNA, 21 bp, Artificial Sequence
  source: /note="Description of Artificial Sequence: Synthetic oligonucleotide"
atcgtcgaagcaagcatcatc

SEQ ID NO: 32850 - DNA, 21 bp, Artificial Sequence
  source: /note="Description of Artificial Sequence: Synthetic oligonucleotide"
atcgtcgaaggactcggagac

SEQ ID NO: 32851 - DNA, 21 bp, Artificial Sequence
  source: /note="Description of Artificial Sequence: Synthetic oligonucleotide"
atcgtcgaaacatacctcaca

SEQ ID NO: 32852 - DNA, 21 bp, Artificial Sequence
  source: /note="Description of Artificial Sequence: Synthetic oligonucleotide"
atcgtcggaagcaaactcgac

SEQ ID NO: 32853 - DNA, 21 bp, Artificial Sequence
  source: /note="Description of Artificial Sequence: Synthetic oligonucleotide"
atcgtcaaaggaatcccaatg

SEQ ID NO: 32854 - DNA, 21 bp, Artificial Sequence
  source: /note="Description of Artificial Sequence: Synthetic oligonucleotide"
atcgtcctcgaaagcatgagc

SEQ ID NO: 32855 - DNA, 21 bp, Artificial Sequence
  source: /note="Description of Artificial Sequence: Synthetic oligonucleotide"
atcgtcctccacctcgacgga

SEQ ID NO: 32856 - DNA, 21 bp, Artificial Sequence
  source: /note="Description of Artificial Sequence: Synthetic oligonucleotide"
atcgtcaacctcagcacatac

SEQ ID NO: 32857 - DNA, 21 bp, Artificial Sequence
  source: /note="Description of Artificial Sequence: Synthetic oligonucleotide"
atcgtccaagtcgcaacaagc

SEQ ID NO: 32858 - DNA, 21 bp, Artificial Sequence
  source: /note="Description of Artificial Sequence: Synthetic oligonucleotide"
atcgtcagacaaacaatcagc

SEQ ID NO: 32859 - DNA, 21 bp, Artificial Sequence
  source: /note="Description of Artificial Sequence: Synthetic oligonucleotide"
atcgtcagaagcagaccagaa

SEQ ID NO: 32860 - DNA, 21 bp, Artificial Sequence
  source: /note="Description of Artificial Sequence: Synthetic oligonucleotide"
atcgtcagccacgacttcgaa

SEQ ID NO: 32861 - DNA, 21 bp, Artificial Sequence
  source: /note="Description of Artificial Sequence: Synthetic oligonucleotide"
atcgtcagcagaatcaacagc

SEQ ID NO: 32862 - DNA, 21 bp, Artificial Sequence
  source: /note="Description of Artificial Sequence: Synthetic oligonucleotide"
atcgtcagcagctacacagac

SEQ ID NO: 32863 - DNA, 21 bp, Artificial Sequence
  source: /note="Description of Artificial Sequence: Synthetic oligonucleotide"
atcgtcacaggaagcggagga

SEQ ID NO: 32864 - DNA, 21 bp, Artificial Sequence
  source: /note="Description of Artificial Sequence: Synthetic oligonucleotide"
atcgtcacaggaagcagagaa

SEQ ID NO: 32865 - DNA, 21 bp, Artificial Sequence
  source: /note="Description of Artificial Sequence: Synthetic oligonucleotide"
atcgtcacaaaatgcccagga

SEQ ID NO: 32866 - DNA, 21 bp, Artificial Sequence
  source: /note="Description of Artificial Sequence: Synthetic oligonucleotide"
atcgtcacaagcaacgtcaca

SEQ ID NO: 32867 - DNA, 21 bp, Artificial Sequence
  source: /note="Description of Artificial Sequence: Synthetic oligonucleotide"
atcgtcacaagcacacaacca

SEQ ID NO: 32868 - DNA, 21 bp, Artificial Sequence
  source: /note="Description of Artificial Sequence: Synthetic oligonucleotide"
atctgggacagctgcagagac

SEQ ID NO: 32869 - DNA, 21 bp, Artificial Sequence
  source: /note="Description of Artificial Sequence: Synthetic oligonucleotide"
atctacaaagtcgacagcagc

SEQ ID NO: 32870 - DNA, 21 bp, Artificial Sequence
  source: /note="Description of Artificial Sequence: Synthetic oligonucleotide"
atctacctcagaaacgaccaa

SEQ ID NO: 32871 - DNA, 21 bp, Artificial Sequence
  source: /note="Description of Artificial Sequence: Synthetic oligonucleotide"
atctaccaaagcgaaagccac

SEQ ID NO: 32872 - DNA, 21 bp, Artificial Sequence
  source: /note="Description of Artificial Sequence: Synthetic oligonucleotide"
atctaccaaagccaacaccac

SEQ ID NO: 32873 - DNA, 21 bp, Artificial Sequence
  source: /note="Description of Artificial Sequence: Synthetic oligonucleotide"
atctacagcgcaaaacaacca

SEQ ID NO: 32874 - DNA, 21 bp, Artificial Sequence
  source: /note="Description of Artificial Sequence: Synthetic oligonucleotide"
atctacagcgtcggagcaaca

SEQ ID NO: 32875 - DNA, 21 bp, Artificial Sequence
  source: /note="Description of Artificial Sequence: Synthetic oligonucleotide"
atctacacaggacaagtccac

SEQ ID NO: 32876 - DNA, 21 bp, Artificial Sequence
  source: /note="Description of Artificial Sequence: Synthetic oligonucleotide"
aaagcagcaaaactcctcgac

SEQ ID NO: 32877 - DNA, 21 bp, Artificial Sequence
  source: /note="Description of Artificial Sequence: Synthetic oligonucleotide"
aaagcagcaaaccaaagcagc

SEQ ID NO: 32878 - DNA, 21 bp, Artificial Sequence
  source: /note="Description of Artificial Sequence: Synthetic oligonucleotide"
aaagcagaccacagcaaagaa

SEQ ID NO: 32879 - DNA, 21 bp, Artificial Sequence
  source: /note="Description of Artificial Sequence: Synthetic oligonucleotide"
aaagcagacatccaagtcaga

SEQ ID NO: 32880 - DNA, 21 bp, Artificial Sequence
  source: /note="Description of Artificial Sequence: Synthetic oligonucleotide"
aaagcagaaacagtcgcacca

SEQ ID NO: 32881 - DNA, 21 bp, Artificial Sequence
  source: /note="Description of Artificial Sequence: Synthetic oligonucleotide"
aaagcattcatcggaatcgac

SEQ ID NO: 32882 - DNA, 21 bp, Artificial Sequence
  source: /note="Description of Artificial Sequence: Synthetic oligonucleotide"
aaagcattcagcccagcactc

SEQ ID NO: 32883 - DNA, 21 bp, Artificial Sequence
  source: /note="Description of Artificial Sequence: Synthetic oligonucleotide"
aaagcaggatgcagcatcagc

SEQ ID NO: 32884 - DNA, 21 bp, Artificial Sequence
  source: /note="Description of Artificial Sequence: Synthetic oligonucleotide"
aaagcaggagtcccagtccca

SEQ ID NO: 32885 - DNA, 21 bp, Artificial Sequence
  source: /note="Description of Artificial Sequence: Synthetic oligonucleotide"
aaagcacacagcacacaaaca

SEQ ID NO: 32886 - DNA, 21 bp, Artificial Sequence
  source: /note="Description of Artificial Sequence: Synthetic oligonucleotide"
aaagcaatcagccaaccattc

SEQ ID NO: 32887 - DNA, 21 bp, Artificial Sequence
  source: /note="Description of Artificial Sequence: Synthetic oligonucleotide"
aaagcactcccaaactacagc

SEQ ID NO: 32888 - DNA, 21 bp, Artificial Sequence
  source: /note="Description of Artificial Sequence: Synthetic oligonucleotide"
aaagcactccaaagatacgac

SEQ ID NO: 32889 - DNA, 21 bp, Artificial Sequence
  source: /note="Description of Artificial Sequence: Synthetic oligonucleotide"
aaagcaatgagcatggacagc

SEQ ID NO: 32890 - DNA, 21 bp, Artificial Sequence
  source: /note="Description of Artificial Sequence: Synthetic oligonucleotide"
aaagcaaaccaactcgacaca

SEQ ID NO: 32891 - DNA, 21 bp, Artificial Sequence
  source: /note="Description of Artificial Sequence: Synthetic oligonucleotide"
aaagcaccactcccagacttc

SEQ ID NO: 32892 - DNA, 21 bp, Artificial Sequence
  source: /note="Description of Artificial Sequence: Synthetic oligonucleotide"
aaagcaccaacaccaagcgtc

SEQ ID NO: 32893 - DNA, 21 bp, Artificial Sequence
  source: /note="Description of Artificial Sequence: Synthetic oligonucleotide"
aaagcacaagaaagagcaaca

SEQ ID NO: 32894 - DNA, 21 bp, Artificial Sequence
  source: /note="Description of Artificial Sequence: Synthetic oligonucleotide"
aaagcacaaagcgcaaacttc

SEQ ID NO: 32895 - DNA, 21 bp, Artificial Sequence
  source: /note="Description of Artificial Sequence: Synthetic oligonucleotide"
aaagcaagcgcaagcatcgca

SEQ ID NO: 32896 - DNA, 21 bp, Artificial Sequence
  source: /note="Description of Artificial Sequence: Synthetic oligonucleotide"
aaagcaagcttcagcccagac

SEQ ID NO: 32897 - DNA, 21 bp, Artificial Sequence
  source: /note="Description of Artificial Sequence: Synthetic oligonucleotide"
aaagcaagccaagcatgcatg

SEQ ID NO: 32898 - DNA, 21 bp, Artificial Sequence
  source: /note="Description of Artificial Sequence: Synthetic oligonucleotide"
aaagcaagccaattcagccca

SEQ ID NO: 32899 - DNA, 21 bp, Artificial Sequence
  source: /note="Description of Artificial Sequence: Synthetic oligonucleotide"
aaagcaagccaaagcggaaca

SEQ ID NO: 32900 - DNA, 21 bp, Artificial Sequence
  source: /note="Description of Artificial Sequence: Synthetic oligonucleotide"
aaagcaacaccaggagtccac

SEQ ID NO: 32901 - DNA, 21 bp, Artificial Sequence
  source: /note="Description of Artificial Sequence: Synthetic oligonucleotide"
aaagcaacaccaaacgtcgga

SEQ ID NO: 32902 - DNA, 21 bp, Artificial Sequence
  source: /note="Description of Artificial Sequence: Synthetic oligonucleotide"
aaagcagtcgcaagcacattc

SEQ ID NO: 32903 - DNA, 21 bp, Artificial Sequence
  source: /note="Description of Artificial Sequence: Synthetic oligonucleotide"
aaagcagtcatcagcccaaca

SEQ ID NO: 32904 - DNA, 21 bp, Artificial Sequence
  source: /note="Description of Artificial Sequence: Synthetic oligonucleotide"
aaagcagtcaacggactcagc

SEQ ID NO: 32905 - DNA, 21 bp, Artificial Sequence
  source: /note="Description of Artificial Sequence: Synthetic oligonucleotide"
aaagcagtcagctggggacca

SEQ ID NO: 32906 - DNA, 21 bp, Artificial Sequence
  source: /note="Description of Artificial Sequence: Synthetic oligonucleotide"
aaatgcagaacatgcagcgtc

SEQ ID NO: 32907 - DNA, 21 bp, Artificial Sequence
  source: /note="Description of Artificial Sequence: Synthetic oligonucleotide"
aaagacgaaccaaactacgga

SEQ ID NO: 32908 - DNA, 21 bp, Artificial Sequence
  source: /note="Description of Artificial Sequence: Synthetic oligonucleotide"
aaagacttcagcaacacactc

SEQ ID NO: 32909 - DNA, 21 bp, Artificial Sequence
  source: /note="Description of Artificial Sequence: Synthetic oligonucleotide"
aaagacggaccattcccaatg

SEQ ID NO: 32910 - DNA, 21 bp, Artificial Sequence
  source: /note="Description of Artificial Sequence: Synthetic oligonucleotide"
aaagacaaaaacccaagcgac

SEQ ID NO: 32911 - DNA, 21 bp, Artificial Sequence
  source: /note="Description of Artificial Sequence: Synthetic oligonucleotide"
aaagacaaagtcgaaatgaac

SEQ ID NO: 32912 - DNA, 21 bp, Artificial Sequence
  source: /note="Description of Artificial Sequence: Synthetic oligonucleotide"
aaagacctcacaagacacgca

SEQ ID NO: 32913 - DNA, 21 bp, Artificial Sequence
  source: /note="Description of Artificial Sequence: Synthetic oligonucleotide"
aaagacatgagaagcaaagac

SEQ ID NO: 32914 - DNA, 21 bp, Artificial Sequence
  source: /note="Description of Artificial Sequence: Synthetic oligonucleotide"
aaagacaacaaaatccaaagc

SEQ ID NO: 32915 - DNA, 21 bp, Artificial Sequence
  source: /note="Description of Artificial Sequence: Synthetic oligonucleotide"
aaagacccaggaagaatcagc

SEQ ID NO: 32916 - DNA, 21 bp, Artificial Sequence
  source: /note="Description of Artificial Sequence: Synthetic oligonucleotide"
aaagacccaatcagcagcgtc

SEQ ID NO: 32917 - DNA, 21 bp, Artificial Sequence
  source: /note="Description of Artificial Sequence: Synthetic oligonucleotide"
aaagacccactcaactgcgca

SEQ ID NO: 32918 - DNA, 21 bp, Artificial Sequence
  source: /note="Description of Artificial Sequence: Synthetic oligonucleotide"
aaagacccaccacaactccac

SEQ ID NO: 32919 - DNA, 21 bp, Artificial Sequence
  source: /note="Description of Artificial Sequence: Synthetic oligonucleotide"
aaagacccacaaacaacagac

SEQ ID NO: 32920 - DNA, 21 bp, Artificial Sequence
  source: /note="Description of Artificial Sequence: Synthetic oligonucleotide"
aaagacagaagcgcaccacca

SEQ ID NO: 32921 - DNA, 21 bp, Artificial Sequence
  source: /note="Description of Artificial Sequence: Synthetic oligonucleotide"
aaagacagaagcctcgaccca

SEQ ID NO: 32922 - DNA, 21 bp, Artificial Sequence
  source: /note="Description of Artificial Sequence: Synthetic oligonucleotide"
aaagacagcgcagcaaacttc

SEQ ID NO: 32923 - DNA, 21 bp, Artificial Sequence
  source: /note="Description of Artificial Sequence: Synthetic oligonucleotide"
aaagacagcacactcctcagc

SEQ ID NO: 32924 - DNA, 21 bp, Artificial Sequence
  source: /note="Description of Artificial Sequence: Synthetic oligonucleotide"
aaagacacagacccactcagc

SEQ ID NO: 32925 - DNA, 21 bp, Artificial Sequence
  source: /note="Description of Artificial Sequence: Synthetic oligonucleotide"
aaagacacaatccacgtcagc

SEQ ID NO: 32926 - DNA, 21 bp, Artificial Sequence
  source: /note="Description of Artificial Sequence: Synthetic oligonucleotide"
aaagacacactcacattcaga

SEQ ID NO: 32927 - DNA, 21 bp, Artificial Sequence
  source: /note="Description of Artificial Sequence: Synthetic oligonucleotide"
aaagacacaccaaacacagtc

SEQ ID NO: 32928 - DNA, 21 bp, Artificial Sequence
  source: /note="Description of Artificial Sequence: Synthetic oligonucleotide"
aaagacacagtcttctaccca

SEQ ID NO: 32929 - DNA, 21 bp, Artificial Sequence
  source: /note="Description of Artificial Sequence: Synthetic oligonucleotide"
aaagaagacagctaccaccca

SEQ ID NO: 32930 - DNA, 21 bp, Artificial Sequence
  source: /note="Description of Artificial Sequence: Synthetic oligonucleotide"
aaagaagacacaaacagaaca

SEQ ID NO: 32931 - DNA, 21 bp, Artificial Sequence
  source: /note="Description of Artificial Sequence: Synthetic oligonucleotide"
aaagaaggaggagaaccaaga

SEQ ID NO: 32932 - DNA, 21 bp, Artificial Sequence
  source: /note="Description of Artificial Sequence: Synthetic oligonucleotide"
aaagaaggaagcaacagagga

SEQ ID NO: 32933 - DNA, 21 bp, Artificial Sequence
  source: /note="Description of Artificial Sequence: Synthetic oligonucleotide"
aaagaacacggagtcatcttc

SEQ ID NO: 32934 - DNA, 21 bp, Artificial Sequence
  source: /note="Description of Artificial Sequence: Synthetic oligonucleotide"
aaagaaatcggattcgcaaca

SEQ ID NO: 32935 - DNA, 21 bp, Artificial Sequence
  source: /note="Description of Artificial Sequence: Synthetic oligonucleotide"
aaagaaaaaccactcaacagc

SEQ ID NO: 32936 - DNA, 21 bp, Artificial Sequence
  source: /note="Description of Artificial Sequence: Synthetic oligonucleotide"
aaagaactcgcagtcggactc

SEQ ID NO: 32937 - DNA, 21 bp, Artificial Sequence
  source: /note="Description of Artificial Sequence: Synthetic oligonucleotide"
aaagaactcgaactccaccca

SEQ ID NO: 32938 - DNA, 21 bp, Artificial Sequence
  source: /note="Description of Artificial Sequence: Synthetic oligonucleotide"
aaagaaatggacatccactgg

SEQ ID NO: 32939 - DNA, 21 bp, Artificial Sequence
  source: /note="Description of Artificial Sequence: Synthetic oligonucleotide"
aaagaaatgagcccaacaaga

SEQ ID NO: 32940 - DNA, 21 bp, Artificial Sequence
  source: /note="Description of Artificial Sequence: Synthetic oligonucleotide"
aaagaaaacccagcaatcgtc

SEQ ID NO: 32941 - DNA, 21 bp, Artificial Sequence
  source: /note="Description of Artificial Sequence: Synthetic oligonucleotide"
aaagaaccaaaagtctggctc

SEQ ID NO: 32942 - DNA, 21 bp, Artificial Sequence
  source: /note="Description of Artificial Sequence: Synthetic oligonucleotide"
aaagaaccaagcacaacaagc

SEQ ID NO: 32943 - DNA, 21 bp, Artificial Sequence
  source: /note="Description of Artificial Sequence: Synthetic oligonucleotide"
aaagaaagcatcagacaaagc

SEQ ID NO: 32944 - DNA, 21 bp, Artificial Sequence
  source: /note="Description of Artificial Sequence: Synthetic oligonucleotide"
aaagaaagcagcagctacctc

SEQ ID NO: 32945 - DNA, 21 bp, Artificial Sequence
  source: /note="Description of Artificial Sequence: Synthetic oligonucleotide"
aaagaaacacaaaacatgcca

SEQ ID NO: 32946 - DNA, 21 bp, Artificial Sequence
  source: /note="Description of Artificial Sequence: Synthetic oligonucleotide"
aaagaagtcaaaacaagcgga

SEQ ID NO: 32947 - DNA, 21 bp, Artificial Sequence
  source: /note="Description of Artificial Sequence: Synthetic oligonucleotide"
aaagaatggacaaacagcgga

SEQ ID NO: 32948 - DNA, 21 bp, Artificial Sequence
  source: /note="Description of Artificial Sequence: Synthetic oligonucleotide"
aaattcgcagcaatgctcaac

SEQ ID NO: 32949 - DNA, 21 bp, Artificial Sequence
  source: /note="Description of Artificial Sequence: Synthetic oligonucleotide"
aaattcgacctcgcaagcgac

SEQ ID NO: 32950 - DNA, 21 bp, Artificial Sequence
  source: /note="Description of Artificial Sequence: Synthetic oligonucleotide"
aaattcgacagcgaactcagc

SEQ ID NO: 32951 - DNA, 21 bp, Artificial Sequence
  source: /note="Description of Artificial Sequence: Synthetic oligonucleotide"
aaattcggagacaacgtcctc

SEQ ID NO: 32952 - DNA, 21 bp, Artificial Sequence
  source: /note="Description of Artificial Sequence: Synthetic oligonucleotide"
aaattcaacagcgcaagcgac

SEQ ID NO: 32953 - DNA, 21 bp, Artificial Sequence
  source: /note="Description of Artificial Sequence: Synthetic oligonucleotide"
aaattcccagaagcacaagga

SEQ ID NO: 32954 - DNA, 21 bp, Artificial Sequence
  source: /note="Description of Artificial Sequence: Synthetic oligonucleotide"
aaattcccacacccaccagca

SEQ ID NO: 32955 - DNA, 21 bp, Artificial Sequence
  source: /note="Description of Artificial Sequence: Synthetic oligonucleotide"
aaattccaaagagaccaagtc

SEQ ID NO: 32956 - DNA, 21 bp, Artificial Sequence
  source: /note="Description of Artificial Sequence: Synthetic oligonucleotide"
aaattccaaagcgtcggaatc

SEQ ID NO: 32957 - DNA, 21 bp, Artificial Sequence
  source: /note="Description of Artificial Sequence: Synthetic oligonucleotide"
aaattcagccaaacagtccca

SEQ ID NO: 32958 - DNA, 21 bp, Artificial Sequence
  source: /note="Description of Artificial Sequence: Synthetic oligonucleotide"
aaattcagcagcaacatcgac

SEQ ID NO: 32959 - DNA, 21 bp, Artificial Sequence
  source: /note="Description of Artificial Sequence: Synthetic oligonucleotide"
aaaggagcactcggagtccca

SEQ ID NO: 32960 - DNA, 21 bp, Artificial Sequence
  source: /note="Description of Artificial Sequence: Synthetic oligonucleotide"
aaaggagaccacgtcacagac

SEQ ID NO: 32961 - DNA, 21 bp, Artificial Sequence
  source: /note="Description of Artificial Sequence: Synthetic oligonucleotide"
aaaggagacatcatcagcgaa

SEQ ID NO: 32962 - DNA, 21 bp, Artificial Sequence
  source: /note="Description of Artificial Sequence: Synthetic oligonucleotide"
aaaggagacatccaagtcagc

SEQ ID NO: 32963 - DNA, 21 bp, Artificial Sequence
  source: /note="Description of Artificial Sequence: Synthetic oligonucleotide"
aaaggagaaatcccaatcgaa

SEQ ID NO: 32964 - DNA, 21 bp, Artificial Sequence
  source: /note="Description of Artificial Sequence: Synthetic oligonucleotide"
aaaggagaagtccaaagcatg

SEQ ID NO: 32965 - DNA, 21 bp, Artificial Sequence
  source: /note="Description of Artificial Sequence: Synthetic oligonucleotide"
aaaggagaatggccaagagaa

SEQ ID NO: 32966 - DNA, 21 bp, Artificial Sequence
  source: /note="Description of Artificial Sequence: Synthetic oligonucleotide"
aaaggattcgacgaaagaagc

SEQ ID NO: 32967 - DNA, 21 bp, Artificial Sequence
  source: /note="Description of Artificial Sequence: Synthetic oligonucleotide"
aaaggaggagtcgcacaatac

SEQ ID NO: 32968 - DNA, 21 bp, Artificial Sequence
  source: /note="Description of Artificial Sequence: Synthetic oligonucleotide"
aaaggactcggagtcgtccca

SEQ ID NO: 32969 - DNA, 21 bp, Artificial Sequence
  source: /note="Description of Artificial Sequence: Synthetic oligonucleotide"
aaaggaccaagcatcgcatgg

SEQ ID NO: 32970 - DNA, 21 bp, Artificial Sequence
  source: /note="Description of Artificial Sequence: Synthetic oligonucleotide"
aaaggaccaagcccaggactc

SEQ ID NO: 32971 - DNA, 21 bp, Artificial Sequence
  source: /note="Description of Artificial Sequence: Synthetic oligonucleotide"
aaaggacaaggacaactcaac

SEQ ID NO: 32972 - DNA, 21 bp, Artificial Sequence
  source: /note="Description of Artificial Sequence: Synthetic oligonucleotide"
aaaggacaaagcagcaacagc

SEQ ID NO: 32973 - DNA, 21 bp, Artificial Sequence
  source: /note="Description of Artificial Sequence: Synthetic oligonucleotide"
aaaggaagagacgcaacaagc

SEQ ID NO: 32974 - DNA, 21 bp, Artificial Sequence
  source: /note="Description of Artificial Sequence: Synthetic oligonucleotide"
aaaggaagcggagtcatcgtc

SEQ ID NO: 32975 - DNA, 21 bp, Artificial Sequence
  source: /note="Description of Artificial Sequence: Synthetic oligonucleotide"
aaaggaagcagcagcatgcac

SEQ ID NO: 32976 - DNA, 21 bp, Artificial Sequence
  source: /note="Description of Artificial Sequence: Synthetic oligonucleotide"
aaaggaacagacctcctcgca

SEQ ID NO: 32977 - DNA, 21 bp, Artificial Sequence
  source: /note="Description of Artificial Sequence: Synthetic oligonucleotide"
aaaggaacaacagtcagcaac

SEQ ID NO: 32978 - DNA, 21 bp, Artificial Sequence
  source: /note="Description of Artificial Sequence: Synthetic oligonucleotide"
aaaggaacaacagtcgtcgtc

SEQ ID NO: 32979 - DNA, 21 bp, Artificial Sequence
  source: /note="Description of Artificial Sequence: Synthetic oligonucleotide"
aaaggaacatacgcaaacaca

SEQ ID NO: 32980 - DNA, 21 bp, Artificial Sequence
  source: /note="Description of Artificial Sequence: Synthetic oligonucleotide"
aaaggaacatacaacgcacac

SEQ ID NO: 32981 - DNA, 21 bp, Artificial Sequence
  source: /note="Description of Artificial Sequence: Synthetic oligonucleotide"
aaaggagtcatcccagaaaaa

SEQ ID NO: 32982 - DNA, 21 bp, Artificial Sequence
  source: /note="Description of Artificial Sequence: Synthetic oligonucleotide"
aaaggagtcctcacagcagtc

SEQ ID NO: 32983 - DNA, 21 bp, Artificial Sequence
  source: /note="Description of Artificial Sequence: Synthetic oligonucleotide"
aaaggagtcaacttcctcgac

SEQ ID NO: 32984 - DNA, 21 bp, Artificial Sequence
  source: /note="Description of Artificial Sequence: Synthetic oligonucleotide"
aaacacgcacaaacaatccca

SEQ ID NO: 32985 - DNA, 21 bp, Artificial Sequence
  source: /note="Description of Artificial Sequence: Synthetic oligonucleotide"
aaacacgacgacagcggaatg

SEQ ID NO: 32986 - DNA, 21 bp, Artificial Sequence
  source: /note="Description of Artificial Sequence: Synthetic oligonucleotide"
aaacacgaaaactggatgaca

SEQ ID NO: 32987 - DNA, 21 bp, Artificial Sequence
  source: /note="Description of Artificial Sequence: Synthetic oligonucleotide"
aaacacgaaccacacggaagc

SEQ ID NO: 32988 - DNA, 21 bp, Artificial Sequence
  source: /note="Description of Artificial Sequence: Synthetic oligonucleotide"
aaacacggagtcgaaatcctc

SEQ ID NO: 32989 - DNA, 21 bp, Artificial Sequence
  source: /note="Description of Artificial Sequence: Synthetic oligonucleotide"
aaacaccacacagtcgaaatg

SEQ ID NO: 32990 - DNA, 21 bp, Artificial Sequence
  source: /note="Description of Artificial Sequence: Synthetic oligonucleotide"
aaacacatcccaggaccagac

SEQ ID NO: 32991 - DNA, 21 bp, Artificial Sequence
  source: /note="Description of Artificial Sequence: Synthetic oligonucleotide"
aaacacatcccaagcgacaga

SEQ ID NO: 32992 - DNA, 21 bp, Artificial Sequence
  source: /note="Description of Artificial Sequence: Synthetic oligonucleotide"
aaacacccaaacgtcccaaca

SEQ ID NO: 32993 - DNA, 21 bp, Artificial Sequence
  source: /note="Description of Artificial Sequence: Synthetic oligonucleotide"
aaacacccaccagcactcaca

SEQ ID NO: 32994 - DNA, 21 bp, Artificial Sequence
  source: /note="Description of Artificial Sequence: Synthetic oligonucleotide"
aaacacccaccagcagtcctc

SEQ ID NO: 32995 - DNA, 21 bp, Artificial Sequence
  source: /note="Description of Artificial Sequence: Synthetic oligonucleotide"
aaacaccaaagcacaatcatc

SEQ ID NO: 32996 - DNA, 21 bp, Artificial Sequence
  source: /note="Description of Artificial Sequence: Synthetic oligonucleotide"
aaacacagcgcagaactcgga

SEQ ID NO: 32997 - DNA, 21 bp, Artificial Sequence
  source: /note="Description of Artificial Sequence: Synthetic oligonucleotide"
aaacacagcatggcaacaaac

SEQ ID NO: 32998 - DNA, 21 bp, Artificial Sequence
  source: /note="Description of Artificial Sequence: Synthetic oligonucleotide"
aaacacagcaacacaccaaac

SEQ ID NO: 32999 - DNA, 21 bp, Artificial Sequence
  source: /note="Description of Artificial Sequence: Synthetic oligonucleotide"
aaacacagctacatggaaaca

SEQ ID NO: 33000 - DNA, 21 bp, Artificial Sequence
  source: /note="Description of Artificial Sequence: Synthetic oligonucleotide"
aaacacacagcactcgtccca

SEQ ID NO: 33001 - DNA, 21 bp, Artificial Sequence
  source: /note="Description of Artificial Sequence: Synthetic oligonucleotide"
aaacacacagcaagcatggca

SEQ ID NO: 33002 - DNA, 21 bp, Artificial Sequence
  source: /note="Description of Artificial Sequence: Synthetic oligonucleotide"
aaacacacacaaaacgacgga

SEQ ID NO: 33003 - DNA, 21 bp, Artificial Sequence
  source: /note="Description of Artificial Sequence: Synthetic oligonucleotide"
aaacacacaagcttcgcacaa

SEQ ID NO: 33004 - DNA, 21 bp, Artificial Sequence
  source: /note="Description of Artificial Sequence: Synthetic oligonucleotide"
aaacacacaacaacaatgttc

SEQ ID NO: 33005 - DNA, 21 bp, Artificial Sequence
  source: /note="Description of Artificial Sequence: Synthetic oligonucleotide"
aaaatcgcaccaatgccacac

SEQ ID NO: 33006 - DNA, 21 bp, Artificial Sequence
  source: /note="Description of Artificial Sequence: Synthetic oligonucleotide"
aaaatcgcaagaagcgaagga

SEQ ID NO: 33007 - DNA, 21 bp, Artificial Sequence
  source: /note="Description of Artificial Sequence: Synthetic oligonucleotide"
aaaatcgcaagcagcctcgga

SEQ ID NO: 33008 - DNA, 21 bp, Artificial Sequence
  source: /note="Description of Artificial Sequence: Synthetic oligonucleotide"
aaaatcgcaacaacaccactc

SEQ ID NO: 33009 - DNA, 21 bp, Artificial Sequence
  source: /note="Description of Artificial Sequence: Synthetic oligonucleotide"
aaaatccacaacctcaacagc

SEQ ID NO: 33010 - DNA, 21 bp, Artificial Sequence
  source: /note="Description of Artificial Sequence: Synthetic oligonucleotide"
aaaatcaacacagcactcaca

SEQ ID NO: 33011 - DNA, 21 bp, Artificial Sequence
  source: /note="Description of Artificial Sequence: Synthetic oligonucleotide"
aaaatcccaatgcaaagcgca

SEQ ID NO: 33012 - DNA, 21 bp, Artificial Sequence
  source: /note="Description of Artificial Sequence: Synthetic oligonucleotide"
aaaatcacagcaacagtcaca

SEQ ID NO: 33013 - DNA, 21 bp, Artificial Sequence
  source: /note="Description of Artificial Sequence: Synthetic oligonucleotide"
aaaaaagacctcagcatgtac

SEQ ID NO: 33014 - DNA, 21 bp, Artificial Sequence
  source: /note="Description of Artificial Sequence: Synthetic oligonucleotide"
aaaaaagacacaggaatcaac

SEQ ID NO: 33015 - DNA, 21 bp, Artificial Sequence
  source: /note="Description of Artificial Sequence: Synthetic oligonucleotide"
aaaaaaccagaagactggaga

SEQ ID NO: 33016 - DNA, 21 bp, Artificial Sequence
  source: /note="Description of Artificial Sequence: Synthetic oligonucleotide"
aaaaaacaaagcgtcgaacca

SEQ ID NO: 33017 - DNA, 21 bp, Artificial Sequence
  source: /note="Description of Artificial Sequence: Synthetic oligonucleotide"
aaaaaagtcagcgacgcactc

SEQ ID NO: 33018 - DNA, 21 bp, Artificial Sequence
  source: /note="Description of Artificial Sequence: Synthetic oligonucleotide"
aaactcgcaggaaaaagcgac

SEQ ID NO: 33019 - DNA, 21 bp, Artificial Sequence
  source: /note="Description of Artificial Sequence: Synthetic oligonucleotide"
aaactcgcaccaagcgtcaca

SEQ ID NO: 33020 - DNA, 21 bp, Artificial Sequence
  source: /note="Description of Artificial Sequence: Synthetic oligonucleotide"
aaactcgcaagcggactccca

SEQ ID NO: 33021 - DNA, 21 bp, Artificial Sequence
  source: /note="Description of Artificial Sequence: Synthetic oligonucleotide"
aaactcgcaagcccaagccca

SEQ ID NO: 33022 - DNA, 21 bp, Artificial Sequence
  source: /note="Description of Artificial Sequence: Synthetic oligonucleotide"
aaactcgcaagcgtcagcgtc

SEQ ID NO: 33023 - DNA, 21 bp, Artificial Sequence
  source: /note="Description of Artificial Sequence: Synthetic oligonucleotide"
aaactcgcaacaacaagagac

SEQ ID NO: 33024 - DNA, 21 bp, Artificial Sequence
  source: /note="Description of Artificial Sequence: Synthetic oligonucleotide"
aaactcgacatcaactaccca

SEQ ID NO: 33025 - DNA, 21 bp, Artificial Sequence
  source: /note="Description of Artificial Sequence: Synthetic oligonucleotide"
aaactcgaaaacggaagctgg

SEQ ID NO: 33026 - DNA, 21 bp, Artificial Sequence
  source: /note="Description of Artificial Sequence: Synthetic oligonucleotide"
aaactcggagcagtcagcctc

SEQ ID NO: 33027 - DNA, 21 bp, Artificial Sequence
  source: /note="Description of Artificial Sequence: Synthetic oligonucleotide"
aaactcggagaaaacacagac

SEQ ID NO: 33028 - DNA, 21 bp, Artificial Sequence
  source: /note="Description of Artificial Sequence: Synthetic oligonucleotide"
aaactcggacacctccacagc

SEQ ID NO: 33029 - DNA, 21 bp, Artificial Sequence
  source: /note="Description of Artificial Sequence: Synthetic oligonucleotide"
aaactcggaacaacaagcagc

SEQ ID NO: 33030 - DNA, 21 bp, Artificial Sequence
  source: /note="Description of Artificial Sequence: Synthetic oligonucleotide"
aaactccacgtcaacacacca

SEQ ID NO: 33031 - DNA, 21 bp, Artificial Sequence
  source: /note="Description of Artificial Sequence: Synthetic oligonucleotide"
aaactcctcggagcagtcgga

SEQ ID NO: 33032 - DNA, 21 bp, Artificial Sequence
  source: /note="Description of Artificial Sequence: Synthetic oligonucleotide"
aaactcctcaaagcaccactc

SEQ ID NO: 33033 - DNA, 21 bp, Artificial Sequence
  source: /note="Description of Artificial Sequence: Synthetic oligonucleotide"
aaactcctcccagaaccagga

SEQ ID NO: 33034 - DNA, 21 bp, Artificial Sequence
  source: /note="Description of Artificial Sequence: Synthetic oligonucleotide"
aaactcctcccaggacaacca

SEQ ID NO: 33035 - DNA, 21 bp, Artificial Sequence
  source: /note="Description of Artificial Sequence: Synthetic oligonucleotide"
aaactcctcccaaacccacca

SEQ ID NO: 33036 - DNA, 21 bp, Artificial Sequence
  source: /note="Description of Artificial Sequence: Synthetic oligonucleotide"
aaactcctcagcatcatggga

SEQ ID NO: 33037 - DNA, 21 bp, Artificial Sequence
  source: /note="Description of Artificial Sequence: Synthetic oligonucleotide"
aaactcctcagcacaggaaca

SEQ ID NO: 33038 - DNA, 21 bp, Artificial Sequence
  source: /note="Description of Artificial Sequence: Synthetic oligonucleotide"
aaactcaacagcccagacgac

SEQ ID NO: 33039 - DNA, 21 bp, Artificial Sequence
  source: /note="Description of Artificial Sequence: Synthetic oligonucleotide"
aaactcccaaacgtcacacca

SEQ ID NO: 33040 - DNA, 21 bp, Artificial Sequence
  source: /note="Description of Artificial Sequence: Synthetic oligonucleotide"
aaactcccaagcgaactcatc

SEQ ID NO: 33041 - DNA, 21 bp, Artificial Sequence
  source: /note="Description of Artificial Sequence: Synthetic oligonucleotide"
aaactccaagtcccattcagc

SEQ ID NO: 33042 - DNA, 21 bp, Artificial Sequence
  source: /note="Description of Artificial Sequence: Synthetic oligonucleotide"
aaactcagagacatctaccca

SEQ ID NO: 33043 - DNA, 21 bp, Artificial Sequence
  source: /note="Description of Artificial Sequence: Synthetic oligonucleotide"
aaactcagcggagaaatcgtc

SEQ ID NO: 33044 - DNA, 21 bp, Artificial Sequence
  source: /note="Description of Artificial Sequence: Synthetic oligonucleotide"
aaactcagccaccaacaattc

SEQ ID NO: 33045 - DNA, 21 bp, Artificial Sequence
  source: /note="Description of Artificial Sequence: Synthetic oligonucleotide"
aaactcagcccaacactcagc

SEQ ID NO: 33046 - DNA, 21 bp, Artificial Sequence
  source: /note="Description of Artificial Sequence: Synthetic oligonucleotide"
aaactcagcagcccagcactc

SEQ ID NO: 33047 - DNA, 21 bp, Artificial Sequence
  source: /note="Description of Artificial Sequence: Synthetic oligonucleotide"
aaactcagcagcagcagctgg

SEQ ID NO: 33048 - DNA, 21 bp, Artificial Sequence
  source: /note="Description of Artificial Sequence: Synthetic oligonucleotide"
aaactcagcacagaaagctgg

SEQ ID NO: 33049 - DNA, 21 bp, Artificial Sequence
  source: /note="Description of Artificial Sequence: Synthetic oligonucleotide"
aaactcagctacagcacactc

SEQ ID NO: 33050 - DNA, 21 bp, Artificial Sequence
  source: /note="Description of Artificial Sequence: Synthetic oligonucleotide"
aaactcacagaaatcgtcgca

SEQ ID NO: 33051 - DNA, 21 bp, Artificial Sequence
  source: /note="Description of Artificial Sequence: Synthetic oligonucleotide"
aaactcacaggatgcaacgac

SEQ ID NO: 33052 - DNA, 21 bp, Artificial Sequence
  source: /note="Description of Artificial Sequence: Synthetic oligonucleotide"
aaactcacaatgacagcacca

SEQ ID NO: 33053 - DNA, 21 bp, Artificial Sequence
  source: /note="Description of Artificial Sequence: Synthetic oligonucleotide"
aaactcacaagcccatacgca

SEQ ID NO: 33054 - DNA, 21 bp, Artificial Sequence
  source: /note="Description of Artificial Sequence: Synthetic oligonucleotide"
aaactcacaagcagcccaaca

SEQ ID NO: 33055 - DNA, 21 bp, Artificial Sequence
  source: /note="Description of Artificial Sequence: Synthetic oligonucleotide"
aaactcacaagcagcacagtc

SEQ ID NO: 33056 - DNA, 21 bp, Artificial Sequence
  source: /note="Description of Artificial Sequence: Synthetic oligonucleotide"
aaaatggcagaagacaaagtc

SEQ ID NO: 33057 - DNA, 21 bp, Artificial Sequence
  source: /note="Description of Artificial Sequence: Synthetic oligonucleotide"
aaaatggacagcgtcctccca

SEQ ID NO: 33058 - DNA, 21 bp, Artificial Sequence
  source: /note="Description of Artificial Sequence: Synthetic oligonucleotide"
aaaatggaacacagaatgctc

SEQ ID NO: 33059 - DNA, 21 bp, Artificial Sequence
  source: /note="Description of Artificial Sequence: Synthetic oligonucleotide"
aaaatgggaacaacactcgga

SEQ ID NO: 33060 - DNA, 21 bp, Artificial Sequence
  source: /note="Description of Artificial Sequence: Synthetic oligonucleotide"
aaaatgctcagcccacaagtc

SEQ ID NO: 33061 - DNA, 21 bp, Artificial Sequence
  source: /note="Description of Artificial Sequence: Synthetic oligonucleotide"
aaaatgaacagcgcagcagga

SEQ ID NO: 33062 - DNA, 21 bp, Artificial Sequence
  source: /note="Description of Artificial Sequence: Synthetic oligonucleotide"
aaaatgccagaagcactcaga

SEQ ID NO: 33063 - DNA, 21 bp, Artificial Sequence
  source: /note="Description of Artificial Sequence: Synthetic oligonucleotide"
aaaatgccaatcccagtccca

SEQ ID NO: 33064 - DNA, 21 bp, Artificial Sequence
  source: /note="Description of Artificial Sequence: Synthetic oligonucleotide"
aaaatgagccacagcctcgac

SEQ ID NO: 33065 - DNA, 21 bp, Artificial Sequence
  source: /note="Description of Artificial Sequence: Synthetic oligonucleotide"
aaaaacgcaatcaacatgatc

SEQ ID NO: 33066 - DNA, 21 bp, Artificial Sequence
  source: /note="Description of Artificial Sequence: Synthetic oligonucleotide"
aaaaacgcaaaaacaatccca

SEQ ID NO: 33067 - DNA, 21 bp, Artificial Sequence
  source: /note="Description of Artificial Sequence: Synthetic oligonucleotide"
aaaaacgcactcccaacaagc

SEQ ID NO: 33068 - DNA, 21 bp, Artificial Sequence
  source: /note="Description of Artificial Sequence: Synthetic oligonucleotide"
aaaaacgcagtcagcggaagc

SEQ ID NO: 33069 - DNA, 21 bp, Artificial Sequence
  source: /note="Description of Artificial Sequence: Synthetic oligonucleotide"
aaaaacgcagtcacaagcgtc

SEQ ID NO: 33070 - DNA, 21 bp, Artificial Sequence
  source: /note="Description of Artificial Sequence: Synthetic oligonucleotide"
aaaaacgaaagactcccaatg

SEQ ID NO: 33071 - DNA, 21 bp, Artificial Sequence
  source: /note="Description of Artificial Sequence: Synthetic oligonucleotide"
aaaaacgaaacaagcagccca

SEQ ID NO: 33072 - DNA, 21 bp, Artificial Sequence
  source: /note="Description of Artificial Sequence: Synthetic oligonucleotide"
aaaaacggagacatccactgc

SEQ ID NO: 33073 - DNA, 21 bp, Artificial Sequence
  source: /note="Description of Artificial Sequence: Synthetic oligonucleotide"
aaaaacggaatcacaccaaac

SEQ ID NO: 33074 - DNA, 21 bp, Artificial Sequence
  source: /note="Description of Artificial Sequence: Synthetic oligonucleotide"
aaaaacggactcagcccagca

SEQ ID NO: 33075 - DNA, 21 bp, Artificial Sequence
  source: /note="Description of Artificial Sequence: Synthetic oligonucleotide"
aaaaacggaacagcacaaagc

SEQ ID NO: 33076 - DNA, 21 bp, Artificial Sequence
  source: /note="Description of Artificial Sequence: Synthetic oligonucleotide"
aaaaaccaccaatacgcagca

SEQ ID NO: 33077 - DNA, 21 bp, Artificial Sequence
  source: /note="Description of Artificial Sequence: Synthetic oligonucleotide"
aaaaacctcccactcgtcagc

SEQ ID NO: 33078 - DNA, 21 bp, Artificial Sequence
  source: /note="Description of Artificial Sequence: Synthetic oligonucleotide"
aaaaacctcagcctcggagga

SEQ ID NO: 33079 - DNA, 21 bp, Artificial Sequence
  source: /note="Description of Artificial Sequence: Synthetic oligonucleotide"
aaaaacccactcctcagccca

SEQ ID NO: 33080 - DNA, 21 bp, Artificial Sequence
  source: /note="Description of Artificial Sequence: Synthetic oligonucleotide"
aaaaacccaatgacagcacca

SEQ ID NO: 33081 - DNA, 21 bp, Artificial Sequence
  source: /note="Description of Artificial Sequence: Synthetic oligonucleotide"
aaaaacccacaagaaccaaca

SEQ ID NO: 33082 - DNA, 21 bp, Artificial Sequence
  source: /note="Description of Artificial Sequence: Synthetic oligonucleotide"
aaaaacccaagagacctcgga

SEQ ID NO: 33083 - DNA, 21 bp, Artificial Sequence
  source: /note="Description of Artificial Sequence: Synthetic oligonucleotide"
aaaaaccaaccactcggatac

SEQ ID NO: 33084 - DNA, 21 bp, Artificial Sequence
  source: /note="Description of Artificial Sequence: Synthetic oligonucleotide"
aaaaacagcacaagccaactc

SEQ ID NO: 33085 - DNA, 21 bp, Artificial Sequence
  source: /note="Description of Artificial Sequence: Synthetic oligonucleotide"
aaaaacgtcatgagcggagca

SEQ ID NO: 33086 - DNA, 21 bp, Artificial Sequence
  source: /note="Description of Artificial Sequence: Synthetic oligonucleotide"
aaaaactacagcgcagcagtc

SEQ ID NO: 33087 - DNA, 21 bp, Artificial Sequence
  source: /note="Description of Artificial Sequence: Synthetic oligonucleotide"
aaaccagcaggaacagacagc

SEQ ID NO: 33088 - DNA, 21 bp, Artificial Sequence
  source: /note="Description of Artificial Sequence: Synthetic oligonucleotide"
aaaccagcaagcaactacgac

SEQ ID NO: 33089 - DNA, 21 bp, Artificial Sequence
  source: /note="Description of Artificial Sequence: Synthetic oligonucleotide"
aaaccagcaacaagcccagga

SEQ ID NO: 33090 - DNA, 21 bp, Artificial Sequence
  source: /note="Description of Artificial Sequence: Synthetic oligonucleotide"
aaaccagcagtcccagtctac

SEQ ID NO: 33091 - DNA, 21 bp, Artificial Sequence
  source: /note="Description of Artificial Sequence: Synthetic oligonucleotide"
aaaccagacagaccaccagac

SEQ ID NO: 33092 - DNA, 21 bp, Artificial Sequence
  source: /note="Description of Artificial Sequence: Synthetic oligonucleotide"
aaaccagaaaacagccacagc

SEQ ID NO: 33093 - DNA, 21 bp, Artificial Sequence
  source: /note="Description of Artificial Sequence: Synthetic oligonucleotide"
aaaccattcgaaacaggaaga

SEQ ID NO: 33094 - DNA, 21 bp, Artificial Sequence
  source: /note="Description of Artificial Sequence: Synthetic oligonucleotide"
aaaccacacccaccaagcttc

SEQ ID NO: 33095 - DNA, 21 bp, Artificial Sequence
  source: /note="Description of Artificial Sequence: Synthetic oligonucleotide"
aaaccaatcctccaaagcagc

SEQ ID NO: 33096 - DNA, 21 bp, Artificial Sequence
  source: /note="Description of Artificial Sequence: Synthetic oligonucleotide"
aaaccactcgcacaactcagc

SEQ ID NO: 33097 - DNA, 21 bp, Artificial Sequence
  source: /note="Description of Artificial Sequence: Synthetic oligonucleotide"
aaaccactcgaccacctcaca

SEQ ID NO: 33098 - DNA, 21 bp, Artificial Sequence
  source: /note="Description of Artificial Sequence: Synthetic oligonucleotide"
aaaccactcgaagtcgaagga

SEQ ID NO: 33099 - DNA, 21 bp, Artificial Sequence
  source: /note="Description of Artificial Sequence: Synthetic oligonucleotide"
aaaccactccaagtcgaccca

SEQ ID NO: 33100 - DNA, 21 bp, Artificial Sequence
  source: /note="Description of Artificial Sequence: Synthetic oligonucleotide"
aaaccaatggcacacctcgaa

SEQ ID NO: 33101 - DNA, 21 bp, Artificial Sequence
  source: /note="Description of Artificial Sequence: Synthetic oligonucleotide"
aaaccaatggacccaacactc

SEQ ID NO: 33102 - DNA, 21 bp, Artificial Sequence
  source: /note="Description of Artificial Sequence: Synthetic oligonucleotide"
aaaccaatgagcatcacacca

SEQ ID NO: 33103 - DNA, 21 bp, Artificial Sequence
  source: /note="Description of Artificial Sequence: Synthetic oligonucleotide"
aaaccaaacgcagtcagcatg

SEQ ID NO: 33104 - DNA, 21 bp, Artificial Sequence
  source: /note="Description of Artificial Sequence: Synthetic oligonucleotide"
aaaccaccaatcctcacaagc

SEQ ID NO: 33105 - DNA, 21 bp, Artificial Sequence
  source: /note="Description of Artificial Sequence: Synthetic oligonucleotide"
aaaccaccactcgcacaagac

SEQ ID NO: 33106 - DNA, 21 bp, Artificial Sequence
  source: /note="Description of Artificial Sequence: Synthetic oligonucleotide"
aaaccaccaagagaagcagac

SEQ ID NO: 33107 - DNA, 21 bp, Artificial Sequence
  source: /note="Description of Artificial Sequence: Synthetic oligonucleotide"
aaaccaagagcaccaagcgac

SEQ ID NO: 33108 - DNA, 21 bp, Artificial Sequence
  source: /note="Description of Artificial Sequence: Synthetic oligonucleotide"
aaaccaagcggacacagcagc

SEQ ID NO: 33109 - DNA, 21 bp, Artificial Sequence
  source: /note="Description of Artificial Sequence: Synthetic oligonucleotide"
aaaccaagcggaccaccaaca

SEQ ID NO: 33110 - DNA, 21 bp, Artificial Sequence
  source: /note="Description of Artificial Sequence: Synthetic oligonucleotide"
aaaccaagcgtcccaacagtc

SEQ ID NO: 33111 - DNA, 21 bp, Artificial Sequence
  source: /note="Description of Artificial Sequence: Synthetic oligonucleotide"
aaaccaacaggaatgcacctc

SEQ ID NO: 33112 - DNA, 21 bp, Artificial Sequence
  source: /note="Description of Artificial Sequence: Synthetic oligonucleotide"
aaaccaacaccaacactcatg

SEQ ID NO: 33113 - DNA, 21 bp, Artificial Sequence
  source: /note="Description of Artificial Sequence: Synthetic oligonucleotide"
aaaccaacagtcatcccagca

SEQ ID NO: 33114 - DNA, 21 bp, Artificial Sequence
  source: /note="Description of Artificial Sequence: Synthetic oligonucleotide"
aaaccagtcggagaattcaca

SEQ ID NO: 33115 - DNA, 21 bp, Artificial Sequence
  source: /note="Description of Artificial Sequence: Synthetic oligonucleotide"
aaaccagtcccacaaccagac

SEQ ID NO: 33116 - DNA, 21 bp, Artificial Sequence
  source: /note="Description of Artificial Sequence: Synthetic oligonucleotide"
aaaccagtcacactcgacaac

SEQ ID NO: 33117 - DNA, 21 bp, Artificial Sequence
  source: /note="Description of Artificial Sequence: Synthetic oligonucleotide"
aaaccagtcacaccacacagc

SEQ ID NO: 33118 - DNA, 21 bp, Artificial Sequence
  source: /note="Description of Artificial Sequence: Synthetic oligonucleotide"
aaaccatacctcccagaaaac

SEQ ID NO: 33119 - DNA, 21 bp, Artificial Sequence
  source: /note="Description of Artificial Sequence: Synthetic oligonucleotide"
aaacaagcagacatcccaaga

SEQ ID NO: 33120 - DNA, 21 bp, Artificial Sequence
  source: /note="Description of Artificial Sequence: Synthetic oligonucleotide"
aaacaagcactcacaatgaca

SEQ ID NO: 33121 - DNA, 21 bp, Artificial Sequence
  source: /note="Description of Artificial Sequence: Synthetic oligonucleotide"
aaacaagacagagacagactc

SEQ ID NO: 33122 - DNA, 21 bp, Artificial Sequence
  source: /note="Description of Artificial Sequence: Synthetic oligonucleotide"
aaacaaggactcacaccaagc

SEQ ID NO: 33123 - DNA, 21 bp, Artificial Sequence
  source: /note="Description of Artificial Sequence: Synthetic oligonucleotide"
aaacaaggagtctggccaaac

SEQ ID NO: 33124 - DNA, 21 bp, Artificial Sequence
  source: /note="Description of Artificial Sequence: Synthetic oligonucleotide"
aaacaaatccaaccaaaaaac

SEQ ID NO: 33125 - DNA, 21 bp, Artificial Sequence
  source: /note="Description of Artificial Sequence: Synthetic oligonucleotide"
aaacaaaaacaccaattcgaa

SEQ ID NO: 33126 - DNA, 21 bp, Artificial Sequence
  source: /note="Description of Artificial Sequence: Synthetic oligonucleotide"
aaacaactcccaatcaacgtc

SEQ ID NO: 33127 - DNA, 21 bp, Artificial Sequence
  source: /note="Description of Artificial Sequence: Synthetic oligonucleotide"
aaacaaatgctcgacccaaca

SEQ ID NO: 33128 - DNA, 21 bp, Artificial Sequence
  source: /note="Description of Artificial Sequence: Synthetic oligonucleotide"
aaacaaatgaacgacctcgca

SEQ ID NO: 33129 - DNA, 21 bp, Artificial Sequence
  source: /note="Description of Artificial Sequence: Synthetic oligonucleotide"
aaacaaaacgtcatcaacaca

SEQ ID NO: 33130 - DNA, 21 bp, Artificial Sequence
  source: /note="Description of Artificial Sequence: Synthetic oligonucleotide"
aaacaaccaccacaaccacca

SEQ ID NO: 33131 - DNA, 21 bp, Artificial Sequence
  source: /note="Description of Artificial Sequence: Synthetic oligonucleotide"
aaacaaagagaacaaccaatg

SEQ ID NO: 33132 - DNA, 21 bp, Artificial Sequence
  source: /note="Description of Artificial Sequence: Synthetic oligonucleotide"
aaacaaagcagccacacaaca

SEQ ID NO: 33133 - DNA, 21 bp, Artificial Sequence
  source: /note="Description of Artificial Sequence: Synthetic oligonucleotide"
aaacaaagcagcacaagcatc

SEQ ID NO: 33134 - DNA, 21 bp, Artificial Sequence
  source: /note="Description of Artificial Sequence: Synthetic oligonucleotide"
aaacaaacaagcgtcacagga

SEQ ID NO: 33135 - DNA, 21 bp, Artificial Sequence
  source: /note="Description of Artificial Sequence: Synthetic oligonucleotide"
aaacaaacaacaccagtcctc

SEQ ID NO: 33136 - DNA, 21 bp, Artificial Sequence
  source: /note="Description of Artificial Sequence: Synthetic oligonucleotide"
aaacaagtcggaagcatgcca

SEQ ID NO: 33137 - DNA, 21 bp, Artificial Sequence
  source: /note="Description of Artificial Sequence: Synthetic oligonucleotide"
aaacaagtcagcagcgaaaga

SEQ ID NO: 33138 - DNA, 21 bp, Artificial Sequence
  source: /note="Description of Artificial Sequence: Synthetic oligonucleotide"
aaacaagtcgtcagcgtcaca

SEQ ID NO: 33139 - DNA, 21 bp, Artificial Sequence
  source: /note="Description of Artificial Sequence: Synthetic oligonucleotide"
aaacaatacagcagcagcgtc

SEQ ID NO: 33140 - DNA, 21 bp, Artificial Sequence
  source: /note="Description of Artificial Sequence: Synthetic oligonucleotide"
aaaagagcaaacgcaatccca

SEQ ID NO: 33141 - DNA, 21 bp, Artificial Sequence
  source: /note="Description of Artificial Sequence: Synthetic oligonucleotide"
aaaagagcagtcgcagcagaa

SEQ ID NO: 33142 - DNA, 21 bp, Artificial Sequence
  source: /note="Description of Artificial Sequence: Synthetic oligonucleotide"
aaaagagacgcagcaatgcca

SEQ ID NO: 33143 - DNA, 21 bp, Artificial Sequence
  source: /note="Description of Artificial Sequence: Synthetic oligonucleotide"
aaaagagacgacatgaacgtc

SEQ ID NO: 33144 - DNA, 21 bp, Artificial Sequence
  source: /note="Description of Artificial Sequence: Synthetic oligonucleotide"
aaaagagacatgggagcagga

SEQ ID NO: 33145 - DNA, 21 bp, Artificial Sequence
  source: /note="Description of Artificial Sequence: Synthetic oligonucleotide"
aaaagagacagcacaagccca

SEQ ID NO: 33146 - DNA, 21 bp, Artificial Sequence
  source: /note="Description of Artificial Sequence: Synthetic oligonucleotide"
aaaagagaattcgaaaacatc

SEQ ID NO: 33147 - DNA, 21 bp, Artificial Sequence
  source: /note="Description of Artificial Sequence: Synthetic oligonucleotide"
aaaagagaaagcatgccaatc

SEQ ID NO: 33148 - DNA, 21 bp, Artificial Sequence
  source: /note="Description of Artificial Sequence: Synthetic oligonucleotide"
aaaagagaagtcctcccaaca

SEQ ID NO: 33149 - DNA, 21 bp, Artificial Sequence
  source: /note="Description of Artificial Sequence: Synthetic oligonucleotide"
aaaagattcagcggagtcgaa

SEQ ID NO: 33150 - DNA, 21 bp, Artificial Sequence
  source: /note="Description of Artificial Sequence: Synthetic oligonucleotide"
aaaagacacgaaagcatgagc

SEQ ID NO: 33151 - DNA, 21 bp, Artificial Sequence
  source: /note="Description of Artificial Sequence: Synthetic oligonucleotide"
aaaagaaacagcctcaacgaa

SEQ ID NO: 33152 - DNA, 21 bp, Artificial Sequence
  source: /note="Description of Artificial Sequence: Synthetic oligonucleotide"
aaaagaccagcagaacacgac

SEQ ID NO: 33153 - DNA, 21 bp, Artificial Sequence
  source: /note="Description of Artificial Sequence: Synthetic oligonucleotide"
aaaagacaacacccagaaatc

SEQ ID NO: 33154 - DNA, 21 bp, Artificial Sequence
  source: /note="Description of Artificial Sequence: Synthetic oligonucleotide"
aaaagaagcctcgacagccca

SEQ ID NO: 33155 - DNA, 21 bp, Artificial Sequence
  source: /note="Description of Artificial Sequence: Synthetic oligonucleotide"
aaaagaagcctcacagaaaca

SEQ ID NO: 33156 - DNA, 21 bp, Artificial Sequence
  source: /note="Description of Artificial Sequence: Synthetic oligonucleotide"
aaaagaacagacggactcgga

SEQ ID NO: 33157 - DNA, 21 bp, Artificial Sequence
  source: /note="Description of Artificial Sequence: Synthetic oligonucleotide"
aaaagaacaagcgaaggagtc

SEQ ID NO: 33158 - DNA, 21 bp, Artificial Sequence
  source: /note="Description of Artificial Sequence: Synthetic oligonucleotide"
aaaagcgcagcaatcgcatac

SEQ ID NO: 33159 - DNA, 21 bp, Artificial Sequence
  source: /note="Description of Artificial Sequence: Synthetic oligonucleotide"
aaaagcgcagaagaaacaagc

SEQ ID NO: 33160 - DNA, 21 bp, Artificial Sequence
  source: /note="Description of Artificial Sequence: Synthetic oligonucleotide"
aaaagcgcactcatgggacca

SEQ ID NO: 33161 - DNA, 21 bp, Artificial Sequence
  source: /note="Description of Artificial Sequence: Synthetic oligonucleotide"
aaaagcgcaagcctcagcatg

SEQ ID NO: 33162 - DNA, 21 bp, Artificial Sequence
  source: /note="Description of Artificial Sequence: Synthetic oligonucleotide"
aaaagcgcaagctggagcgaa

SEQ ID NO: 33163 - DNA, 21 bp, Artificial Sequence
  source: /note="Description of Artificial Sequence: Synthetic oligonucleotide"
aaaagcgacatgccattcaac

SEQ ID NO: 33164 - DNA, 21 bp, Artificial Sequence
  source: /note="Description of Artificial Sequence: Synthetic oligonucleotide"
aaaagcgacccagaatggcca

SEQ ID NO: 33165 - DNA, 21 bp, Artificial Sequence
  source: /note="Description of Artificial Sequence: Synthetic oligonucleotide"
aaaagcgacgtcatgttccaa

SEQ ID NO: 33166 - DNA, 21 bp, Artificial Sequence
  source: /note="Description of Artificial Sequence: Synthetic oligonucleotide"
aaaagcgaaagatacgcagtc

SEQ ID NO: 33167 - DNA, 21 bp, Artificial Sequence
  source: /note="Description of Artificial Sequence: Synthetic oligonucleotide"
aaaagcttcccagtcgtccaa

SEQ ID NO: 33168 - DNA, 21 bp, Artificial Sequence
  source: /note="Description of Artificial Sequence: Synthetic oligonucleotide"
aaaagcttccaaagcacacca

SEQ ID NO: 33169 - DNA, 21 bp, Artificial Sequence
  source: /note="Description of Artificial Sequence: Synthetic oligonucleotide"
aaaagcggaccagtcacactc

SEQ ID NO: 33170 - DNA, 21 bp, Artificial Sequence
  source: /note="Description of Artificial Sequence: Synthetic oligonucleotide"
aaaagcggaacagcattcagc

SEQ ID NO: 33171 - DNA, 21 bp, Artificial Sequence
  source: /note="Description of Artificial Sequence: Synthetic oligonucleotide"
aaaagcggagtccaaagccca

SEQ ID NO: 33172 - DNA, 21 bp, Artificial Sequence
  source: /note="Description of Artificial Sequence: Synthetic oligonucleotide"
aaaagcatcgcaacaagcgga

SEQ ID NO: 33173 - DNA, 21 bp, Artificial Sequence
  source: /note="Description of Artificial Sequence: Synthetic oligonucleotide"
aaaagcatcgaattcttcgca

SEQ ID NO: 33174 - DNA, 21 bp, Artificial Sequence
  source: /note="Description of Artificial Sequence: Synthetic oligonucleotide"
aaaagcatcagagaagaccca

SEQ ID NO: 33175 - DNA, 21 bp, Artificial Sequence
  source: /note="Description of Artificial Sequence: Synthetic oligonucleotide"
aaaagcaaagacgtcagatac

SEQ ID NO: 33176 - DNA, 21 bp, Artificial Sequence
  source: /note="Description of Artificial Sequence: Synthetic oligonucleotide"
aaaagcatggacacaacagga

SEQ ID NO: 33177 - DNA, 21 bp, Artificial Sequence
  source: /note="Description of Artificial Sequence: Synthetic oligonucleotide"
aaaagcaacgcatgcctccac

SEQ ID NO: 33178 - DNA, 21 bp, Artificial Sequence
  source: /note="Description of Artificial Sequence: Synthetic oligonucleotide"
aaaagcaacgacagaacagac

SEQ ID NO: 33179 - DNA, 21 bp, Artificial Sequence
  source: /note="Description of Artificial Sequence: Synthetic oligonucleotide"
aaaagcaacacaccagcagca

SEQ ID NO: 33180 - DNA, 21 bp, Artificial Sequence
  source: /note="Description of Artificial Sequence: Synthetic oligonucleotide"
aaaagcaacacaacagcagac

SEQ ID NO: 33181 - DNA, 21 bp, Artificial Sequence
  source: /note="Description of Artificial Sequence: Synthetic oligonucleotide"
aaaagcccagcagaaatcgca

SEQ ID NO: 33182 - DNA, 21 bp, Artificial Sequence
  source: /note="Description of Artificial Sequence: Synthetic oligonucleotide"
aaaagcccagacggaatggtc

SEQ ID NO: 33183 - DNA, 21 bp, Artificial Sequence
  source: /note="Description of Artificial Sequence: Synthetic oligonucleotide"
aaaagcccagacagataccac

SEQ ID NO: 33184 - DNA, 21 bp, Artificial Sequence
  source: /note="Description of Artificial Sequence: Synthetic oligonucleotide"
aaaagcccaggagtcatggtc

SEQ ID NO: 33185 - DNA, 21 bp, Artificial Sequence
  source: /note="Description of Artificial Sequence: Synthetic oligonucleotide"
aaaagcccaagaacaccagaa

SEQ ID NO: 33186 - DNA, 21 bp, Artificial Sequence
  source: /note="Description of Artificial Sequence: Synthetic oligonucleotide"
aaaagcccaagccacgcagca

SEQ ID NO: 33187 - DNA, 21 bp, Artificial Sequence
  source: /note="Description of Artificial Sequence: Synthetic oligonucleotide"
aaaagcccaagcacattccac

SEQ ID NO: 33188 - DNA, 21 bp, Artificial Sequence
  source: /note="Description of Artificial Sequence: Synthetic oligonucleotide"
aaaagcccaacactcgcaagc

SEQ ID NO: 33189 - DNA, 21 bp, Artificial Sequence
  source: /note="Description of Artificial Sequence: Synthetic oligonucleotide"
aaaagcccagtcagagacaca

SEQ ID NO: 33190 - DNA, 21 bp, Artificial Sequence
  source: /note="Description of Artificial Sequence: Synthetic oligonucleotide"
aaaagcccagtcagcggaaac

SEQ ID NO: 33191 - DNA, 21 bp, Artificial Sequence
  source: /note="Description of Artificial Sequence: Synthetic oligonucleotide"
aaaagcccagtcagcagctac

SEQ ID NO: 33192 - DNA, 21 bp, Artificial Sequence
  source: /note="Description of Artificial Sequence: Synthetic oligonucleotide"
aaaagccaagcagaattcgga

SEQ ID NO: 33193 - DNA, 21 bp, Artificial Sequence
  source: /note="Description of Artificial Sequence: Synthetic oligonucleotide"
aaaagccaagcactcacagac

SEQ ID NO: 33194 - DNA, 21 bp, Artificial Sequence
  source: /note="Description of Artificial Sequence: Synthetic oligonucleotide"
aaaagccaaggaagccactac

SEQ ID NO: 33195 - DNA, 21 bp, Artificial Sequence
  source: /note="Description of Artificial Sequence: Synthetic oligonucleotide"
aaaagccaacactacccaagc

SEQ ID NO: 33196 - DNA, 21 bp, Artificial Sequence
  source: /note="Description of Artificial Sequence: Synthetic oligonucleotide"
aaaagccaaagcgacaaagtc

SEQ ID NO: 33197 - DNA, 21 bp, Artificial Sequence
  source: /note="Description of Artificial Sequence: Synthetic oligonucleotide"
aaaagccaaagcggaaacatg

SEQ ID NO: 33198 - DNA, 21 bp, Artificial Sequence
  source: /note="Description of Artificial Sequence: Synthetic oligonucleotide"
aaaagcagagacaacctcaac

SEQ ID NO: 33199 - DNA, 21 bp, Artificial Sequence
  source: /note="Description of Artificial Sequence: Synthetic oligonucleotide"
aaaagcagaaacctcgaacca

SEQ ID NO: 33200 - DNA, 21 bp, Artificial Sequence
  source: /note="Description of Artificial Sequence: Synthetic oligonucleotide"
aaaagcagaacaggaacagaa

SEQ ID NO: 33201 - DNA, 21 bp, Artificial Sequence
  source: /note="Description of Artificial Sequence: Synthetic oligonucleotide"
aaaagcagcgcacacgcatgg

SEQ ID NO: 33202 - DNA, 21 bp, Artificial Sequence
  source: /note="Description of Artificial Sequence: Synthetic oligonucleotide"
aaaagcagcgacatggtcgtc

SEQ ID NO: 33203 - DNA, 21 bp, Artificial Sequence
  source: /note="Description of Artificial Sequence: Synthetic oligonucleotide"
aaaagcagccacccaccagtc

SEQ ID NO: 33204 - DNA, 21 bp, Artificial Sequence
  source: /note="Description of Artificial Sequence: Synthetic oligonucleotide"
aaaagcagcccactcacaagc

SEQ ID NO: 33205 - DNA, 21 bp, Artificial Sequence
  source: /note="Description of Artificial Sequence: Synthetic oligonucleotide"
aaaagcagccaacaaagcatc

SEQ ID NO: 33206 - DNA, 21 bp, Artificial Sequence
  source: /note="Description of Artificial Sequence: Synthetic oligonucleotide"
aaaagcagcagcggagacaaa

SEQ ID NO: 33207 - DNA, 21 bp, Artificial Sequence
  source: /note="Description of Artificial Sequence: Synthetic oligonucleotide"
aaaagcagcagcggactcgaa

SEQ ID NO: 33208 - DNA, 21 bp, Artificial Sequence
  source: /note="Description of Artificial Sequence: Synthetic oligonucleotide"
aaaagcagcacagcaggagtc

SEQ ID NO: 33209 - DNA, 21 bp, Artificial Sequence
  source: /note="Description of Artificial Sequence: Synthetic oligonucleotide"
aaaagcagcacaagcggaaac

SEQ ID NO: 33210 - DNA, 21 bp, Artificial Sequence
  source: /note="Description of Artificial Sequence: Synthetic oligonucleotide"
aaaagcagctactacccagca

SEQ ID NO: 33211 - DNA, 21 bp, Artificial Sequence
  source: /note="Description of Artificial Sequence: Synthetic oligonucleotide"
aaaagcacacacgacgtccca

SEQ ID NO: 33212 - DNA, 21 bp, Artificial Sequence
  source: /note="Description of Artificial Sequence: Synthetic oligonucleotide"
aaaagcacaccaagagaagga

SEQ ID NO: 33213 - DNA, 21 bp, Artificial Sequence
  source: /note="Description of Artificial Sequence: Synthetic oligonucleotide"
aaaagcacaagcggaatgcca

SEQ ID NO: 33214 - DNA, 21 bp, Artificial Sequence
  source: /note="Description of Artificial Sequence: Synthetic oligonucleotide"
aaaagcacagtcccagacctc

SEQ ID NO: 33215 - DNA, 21 bp, Artificial Sequence
  source: /note="Description of Artificial Sequence: Synthetic oligonucleotide"
aaaagcacagtcacacacttc

SEQ ID NO: 33216 - DNA, 21 bp, Artificial Sequence
  source: /note="Description of Artificial Sequence: Synthetic oligonucleotide"
aaaagcgtcgcaatcagcgtc

SEQ ID NO: 33217 - DNA, 21 bp, Artificial Sequence
  source: /note="Description of Artificial Sequence: Synthetic oligonucleotide"
aaaagcgtcggactcagcagc

SEQ ID NO: 33218 - DNA, 21 bp, Artificial Sequence
  source: /note="Description of Artificial Sequence: Synthetic oligonucleotide"
aaaagcgtcctcgtcgaaagc

SEQ ID NO: 33219 - DNA, 21 bp, Artificial Sequence
  source: /note="Description of Artificial Sequence: Synthetic oligonucleotide"
aaaagctacaacagcccatac

SEQ ID NO: 33220 - DNA, 21 bp, Artificial Sequence
  source: /note="Description of Artificial Sequence: Synthetic oligonucleotide"
aaaagctacccaaacgaccac

SEQ ID NO: 33221 - DNA, 21 bp, Artificial Sequence
  source: /note="Description of Artificial Sequence: Synthetic oligonucleotide"
aaaagctacccaccagcactc

SEQ ID NO: 33222 - DNA, 21 bp, Artificial Sequence
  source: /note="Description of Artificial Sequence: Synthetic oligonucleotide"
aaaacagcagacgcaccaaga

SEQ ID NO: 33223 - DNA, 21 bp, Artificial Sequence
  source: /note="Description of Artificial Sequence: Synthetic oligonucleotide"
aaaacagcaagcctcggacca

SEQ ID NO: 33224 - DNA, 21 bp, Artificial Sequence
  source: /note="Description of Artificial Sequence: Synthetic oligonucleotide"
aaaacagcaagcatgccaaca

SEQ ID NO: 33225 - DNA, 21 bp, Artificial Sequence
  source: /note="Description of Artificial Sequence: Synthetic oligonucleotide"
aaaacagacagaacactccaa

SEQ ID NO: 33226 - DNA, 21 bp, Artificial Sequence
  source: /note="Description of Artificial Sequence: Synthetic oligonucleotide"
aaaacagacagcagagtccca

SEQ ID NO: 33227 - DNA, 21 bp, Artificial Sequence
  source: /note="Description of Artificial Sequence: Synthetic oligonucleotide"
aaaacagaattcagaaaccca

SEQ ID NO: 33228 - DNA, 21 bp, Artificial Sequence
  source: /note="Description of Artificial Sequence: Synthetic oligonucleotide"
aaaacagaaggaagcggatgg

SEQ ID NO: 33229 - DNA, 21 bp, Artificial Sequence
  source: /note="Description of Artificial Sequence: Synthetic oligonucleotide"
aaaacagaaagaacactcatc

SEQ ID NO: 33230 - DNA, 21 bp, Artificial Sequence
  source: /note="Description of Artificial Sequence: Synthetic oligonucleotide"
aaaacattcacagaaaaaaca

SEQ ID NO: 33231 - DNA, 21 bp, Artificial Sequence
  source: /note="Description of Artificial Sequence: Synthetic oligonucleotide"
aaaacaggaccaccaccagtc

SEQ ID NO: 33232 - DNA, 21 bp, Artificial Sequence
  source: /note="Description of Artificial Sequence: Synthetic oligonucleotide"
aaaacaggagtcagcagcgac

SEQ ID NO: 33233 - DNA, 21 bp, Artificial Sequence
  source: /note="Description of Artificial Sequence: Synthetic oligonucleotide"
aaaacacacggactctgcctc

SEQ ID NO: 33234 - DNA, 21 bp, Artificial Sequence
  source: /note="Description of Artificial Sequence: Synthetic oligonucleotide"
aaaacaatcatcacagacctc

SEQ ID NO: 33235 - DNA, 21 bp, Artificial Sequence
  source: /note="Description of Artificial Sequence: Synthetic oligonucleotide"
aaaacactcccactcccagaa

SEQ ID NO: 33236 - DNA, 21 bp, Artificial Sequence
  source: /note="Description of Artificial Sequence: Synthetic oligonucleotide"
aaaacaatgacaacagtccca

SEQ ID NO: 33237 - DNA, 21 bp, Artificial Sequence
  source: /note="Description of Artificial Sequence: Synthetic oligonucleotide"
aaaacaatggtcccagtcgtc

SEQ ID NO: 33238 - DNA, 21 bp, Artificial Sequence
  source: /note="Description of Artificial Sequence: Synthetic oligonucleotide"
aaaacaaacggacacaactac

SEQ ID NO: 33239 - DNA, 21 bp, Artificial Sequence
  source: /note="Description of Artificial Sequence: Synthetic oligonucleotide"
aaaacaaacccactcgcacaa

SEQ ID NO: 33240 - DNA, 21 bp, Artificial Sequence
  source: /note="Description of Artificial Sequence: Synthetic oligonucleotide"
aaaacaaacagcgaaatcatc

SEQ ID NO: 33241 - DNA, 21 bp, Artificial Sequence
  source: /note="Description of Artificial Sequence: Synthetic oligonucleotide"
aaaacaccagacccaaaaaaa

SEQ ID NO: 33242 - DNA, 21 bp, Artificial Sequence
  source: /note="Description of Artificial Sequence: Synthetic oligonucleotide"
aaaacaccaatggtcgaactc

SEQ ID NO: 33243 - DNA, 21 bp, Artificial Sequence
  source: /note="Description of Artificial Sequence: Synthetic oligonucleotide"
aaaacacaactcatgacaagc

SEQ ID NO: 33244 - DNA, 21 bp, Artificial Sequence
  source: /note="Description of Artificial Sequence: Synthetic oligonucleotide"
aaaacacaaccaggaagcgtc

SEQ ID NO: 33245 - DNA, 21 bp, Artificial Sequence
  source: /note="Description of Artificial Sequence: Synthetic oligonucleotide"
aaaacacaaagcatcctcagc

SEQ ID NO: 33246 - DNA, 21 bp, Artificial Sequence
  source: /note="Description of Artificial Sequence: Synthetic oligonucleotide"
aaaacaagcgaagtcagatgg

SEQ ID NO: 33247 - DNA, 21 bp, Artificial Sequence
  source: /note="Description of Artificial Sequence: Synthetic oligonucleotide"
aaaacaagccaaagccacaca

SEQ ID NO: 33248 - DNA, 21 bp, Artificial Sequence
  source: /note="Description of Artificial Sequence: Synthetic oligonucleotide"
aaaacaagcgtcacaagagac

SEQ ID NO: 33249 - DNA, 21 bp, Artificial Sequence
  source: /note="Description of Artificial Sequence: Synthetic oligonucleotide"
aaaacaacagcaccacacatc

SEQ ID NO: 33250 - DNA, 21 bp, Artificial Sequence
  source: /note="Description of Artificial Sequence: Synthetic oligonucleotide"
aaaacaacagacagaatccca

SEQ ID NO: 33251 - DNA, 21 bp, Artificial Sequence
  source: /note="Description of Artificial Sequence: Synthetic oligonucleotide"
aaaacaacactcatgacaagc

SEQ ID NO: 33252 - DNA, 21 bp, Artificial Sequence
  source: /note="Description of Artificial Sequence: Synthetic oligonucleotide"
aaaacaacaccagtcctcgtc

SEQ ID NO: 33253 - DNA, 21 bp, Artificial Sequence
  source: /note="Description of Artificial Sequence: Synthetic oligonucleotide"
aaaacaacacaaaacagcaac

SEQ ID NO: 33254 - DNA, 21 bp, Artificial Sequence
  source: /note="Description of Artificial Sequence: Synthetic oligonucleotide"
aaaacaacaagcaaaccacca

SEQ ID NO: 33255 - DNA, 21 bp, Artificial Sequence
  source: /note="Description of Artificial Sequence: Synthetic oligonucleotide"
aaaacagtcgcaatggaaaga

SEQ ID NO: 33256 - DNA, 21 bp, Artificial Sequence
  source: /note="Description of Artificial Sequence: Synthetic oligonucleotide"
aaaacagtcagagaaacaagc

SEQ ID NO: 33257 - DNA, 21 bp, Artificial Sequence
  source: /note="Description of Artificial Sequence: Synthetic oligonucleotide"
aaaacagtcacaaacgtcctc

SEQ ID NO: 33258 - DNA, 21 bp, Artificial Sequence
  source: /note="Description of Artificial Sequence: Synthetic oligonucleotide"
aaaacagtcgtcgcaaaccca

SEQ ID NO: 33259 - DNA, 21 bp, Artificial Sequence
  source: /note="Description of Artificial Sequence: Synthetic oligonucleotide"
aaaacatacggaacacacgca

SEQ ID NO: 33260 - DNA, 21 bp, Artificial Sequence
  source: /note="Description of Artificial Sequence: Synthetic oligonucleotide"
aaagtcgcactcgcaacactc

SEQ ID NO: 33261 - DNA, 21 bp, Artificial Sequence
  source: /note="Description of Artificial Sequence: Synthetic oligonucleotide"
aaagtcgcaatgccagtcctc

SEQ ID NO: 33262 - DNA, 21 bp, Artificial Sequence
  source: /note="Description of Artificial Sequence: Synthetic oligonucleotide"
aaagtcgcaacaagcacaatc

SEQ ID NO: 33263 - DNA, 21 bp, Artificial Sequence
  source: /note="Description of Artificial Sequence: Synthetic oligonucleotide"
aaagtcgacagcagagaacca

SEQ ID NO: 33264 - DNA, 21 bp, Artificial Sequence
  source: /note="Description of Artificial Sequence: Synthetic oligonucleotide"
aaagtcgacgtcctctacaac

SEQ ID NO: 33265 - DNA, 21 bp, Artificial Sequence
  source: /note="Description of Artificial Sequence: Synthetic oligonucleotide"
aaagtcgaaagcatggacagc

SEQ ID NO: 33266 - DNA, 21 bp, Artificial Sequence
  source: /note="Description of Artificial Sequence: Synthetic oligonucleotide"
aaagtcggagcaggaaacaca

SEQ ID NO: 33267 - DNA, 21 bp, Artificial Sequence
  source: /note="Description of Artificial Sequence: Synthetic oligonucleotide"
aaagtcggaaacaacgcatac

SEQ ID NO: 33268 - DNA, 21 bp, Artificial Sequence
  source: /note="Description of Artificial Sequence: Synthetic oligonucleotide"
aaagtcggaagcgtctacaca

SEQ ID NO: 33269 - DNA, 21 bp, Artificial Sequence
  source: /note="Description of Artificial Sequence: Synthetic oligonucleotide"
aaagtcctccaaccacaccca

SEQ ID NO: 33270 - DNA, 21 bp, Artificial Sequence
  source: /note="Description of Artificial Sequence: Synthetic oligonucleotide"
aaagtcaacatcacagcattc

SEQ ID NO: 33271 - DNA, 21 bp, Artificial Sequence
  source: /note="Description of Artificial Sequence: Synthetic oligonucleotide"
aaagtcaacctcttcgcagga

SEQ ID NO: 33272 - DNA, 21 bp, Artificial Sequence
  source: /note="Description of Artificial Sequence: Synthetic oligonucleotide"
aaagtcaacagcgtcgcattc

SEQ ID NO: 33273 - DNA, 21 bp, Artificial Sequence
  source: /note="Description of Artificial Sequence: Synthetic oligonucleotide"
aaagtccaagaaagaagccaa

SEQ ID NO: 33274 - DNA, 21 bp, Artificial Sequence
  source: /note="Description of Artificial Sequence: Synthetic oligonucleotide"
aaagtcagcgcagcactcagc

SEQ ID NO: 33275 - DNA, 21 bp, Artificial Sequence
  source: /note="Description of Artificial Sequence: Synthetic oligonucleotide"
aaagtcagcggactcagcatg

SEQ ID NO: 33276 - DNA, 21 bp, Artificial Sequence
  source: /note="Description of Artificial Sequence: Synthetic oligonucleotide"
aaagtcagcagaatcagcgac

SEQ ID NO: 33277 - DNA, 21 bp, Artificial Sequence
  source: /note="Description of Artificial Sequence: Synthetic oligonucleotide"
aaagtcagcagcacagtcgaa

SEQ ID NO: 33278 - DNA, 21 bp, Artificial Sequence
  source: /note="Description of Artificial Sequence: Synthetic oligonucleotide"
aaagtcacagcaccaaacgca

SEQ ID NO: 33279 - DNA, 21 bp, Artificial Sequence
  source: /note="Description of Artificial Sequence: Synthetic oligonucleotide"
aaagtcacaggaatgccagtc

SEQ ID NO: 33280 - DNA, 21 bp, Artificial Sequence
  source: /note="Description of Artificial Sequence: Synthetic oligonucleotide"
aaagtcacaggatacagcgaa

SEQ ID NO: 33281 - DNA, 21 bp, Artificial Sequence
  source: /note="Description of Artificial Sequence: Synthetic oligonucleotide"
aaagtcacaacaccactccca

SEQ ID NO: 33282 - DNA, 21 bp, Artificial Sequence
  source: /note="Description of Artificial Sequence: Synthetic oligonucleotide"
aaagtcgtcgcaccagcactc

SEQ ID NO: 33283 - DNA, 21 bp, Artificial Sequence
  source: /note="Description of Artificial Sequence: Synthetic oligonucleotide"
aaagtcgtcctcagagaagga

SEQ ID NO: 33284 - DNA, 21 bp, Artificial Sequence
  source: /note="Description of Artificial Sequence: Synthetic oligonucleotide"
aaagtcgtcacagcaccagaa

SEQ ID NO: 33285 - DNA, 21 bp, Artificial Sequence
  source: /note="Description of Artificial Sequence: Synthetic oligonucleotide"
aaatggacagacggaccagca

SEQ ID NO: 33286 - DNA, 21 bp, Artificial Sequence
  source: /note="Description of Artificial Sequence: Synthetic oligonucleotide"
aaatgggtcccagaaagccca

SEQ ID NO: 33287 - DNA, 21 bp, Artificial Sequence
  source: /note="Description of Artificial Sequence: Synthetic oligonucleotide"
aaatacgcacacagcccaaca

SEQ ID NO: 33288 - DNA, 21 bp, Artificial Sequence
  source: /note="Description of Artificial Sequence: Synthetic oligonucleotide"
aaatacgcaacaaacgcagca

SEQ ID NO: 33289 - DNA, 21 bp, Artificial Sequence
  source: /note="Description of Artificial Sequence: Synthetic oligonucleotide"
aaatacgacggaggacaacac

SEQ ID NO: 33290 - DNA, 21 bp, Artificial Sequence
  source: /note="Description of Artificial Sequence: Synthetic oligonucleotide"
aaatacggaagcacagtcgtc

SEQ ID NO: 33291 - DNA, 21 bp, Artificial Sequence
  source: /note="Description of Artificial Sequence: Synthetic oligonucleotide"
aaatacaaagacctcccagca

SEQ ID NO: 33292 - DNA, 21 bp, Artificial Sequence
  source: /note="Description of Artificial Sequence: Synthetic oligonucleotide"
aaatacccagcactcagcgca

SEQ ID NO: 33293 - DNA, 21 bp, Artificial Sequence
  source: /note="Description of Artificial Sequence: Synthetic oligonucleotide"
aaatacagagaaaacaacgtc

SEQ ID NO: 33294 - DNA, 21 bp, Artificial Sequence
  source: /note="Description of Artificial Sequence: Synthetic oligonucleotide"
aaatacagcaaaccagacaca

SEQ ID NO: 33295 - DNA, 21 bp, Artificial Sequence
  source: /note="Description of Artificial Sequence: Synthetic oligonucleotide"
aaatacacaggaagacaagaa

SEQ ID NO: 33296 - DNA, 21 bp, Artificial Sequence
  source: /note="Description of Artificial Sequence: Synthetic oligonucleotide"
aaatacacactcacaccaaac

SEQ ID NO: 33297 - DNA, 21 bp, Artificial Sequence
  source: /note="Description of Artificial Sequence: Synthetic oligonucleotide"
aaatacgtctgcggaccaaac

SEQ ID NO: 33298 - DNA, 21 bp, Artificial Sequence
  source: /note="Description of Artificial Sequence: Synthetic oligonucleotide"
aaatacgtcggaggaccaaac

SEQ ID NO: 33299 - DNA, 21 bp, Artificial Sequence
  source: /note="Description of Artificial Sequence: Synthetic oligonucleotide"
aaatacgtcaacggagtcgac

SEQ ID NO: 33300 - DNA, 21 bp, Artificial Sequence
  source: /note="Description of Artificial Sequence: Synthetic oligonucleotide"
aaatacgtcacaacaagccca

SEQ ID NO: 33301 - DNA, 21 bp, Artificial Sequence
  source: /note="Description of Artificial Sequence: Synthetic oligonucleotide"
ctcgcagcagacgtcagattc

SEQ ID NO: 33302 - DNA, 21 bp, Artificial Sequence
  source: /note="Description of Artificial Sequence: Synthetic oligonucleotide"
ctcgcagcaggatgcccagtc

SEQ ID NO: 33303 - DNA, 21 bp, Artificial Sequence
  source: /note="Description of Artificial Sequence: Synthetic oligonucleotide"
ctcgcagcaggaatcagattc

SEQ ID NO: 33304 - DNA, 21 bp, Artificial Sequence
  source: /note="Description of Artificial Sequence: Synthetic oligonucleotide"
ctcgcagcaaaaccactcatc

SEQ ID NO: 33305 - DNA, 21 bp, Artificial Sequence
  source: /note="Description of Artificial Sequence: Synthetic oligonucleotide"
ctcgcagcaaacggagcacac

SEQ ID NO: 33306 - DNA, 21 bp, Artificial Sequence
  source: /note="Description of Artificial Sequence: Synthetic oligonucleotide"
ctcgcagcaccaacaagcagc

SEQ ID NO: 33307 - DNA, 21 bp, Artificial Sequence
  source: /note="Description of Artificial Sequence: Synthetic oligonucleotide"
ctcgcagcacaagacaaagaa

SEQ ID NO: 33308 - DNA, 21 bp, Artificial Sequence
  source: /note="Description of Artificial Sequence: Synthetic oligonucleotide"
ctcgcagcaagaatgcaacca

SEQ ID NO: 33309 - DNA, 21 bp, Artificial Sequence
  source: /note="Description of Artificial Sequence: Synthetic oligonucleotide"
ctcgcagcaagaagaccagac

SEQ ID NO: 33310 - DNA, 21 bp, Artificial Sequence
  source: /note="Description of Artificial Sequence: Synthetic oligonucleotide"
ctcgcagcaagcagcagacca

SEQ ID NO: 33311 - DNA, 21 bp, Artificial Sequence
  source: /note="Description of Artificial Sequence: Synthetic oligonucleotide"
ctcgcagacaaaccagcaatg

SEQ ID NO: 33312 - DNA, 21 bp, Artificial Sequence
  source: /note="Description of Artificial Sequence: Synthetic oligonucleotide"
ctcgcagacatgctcaaaagc

SEQ ID NO: 33313 - DNA, 21 bp, Artificial Sequence
  source: /note="Description of Artificial Sequence: Synthetic oligonucleotide"
ctcgcagacagagaaaacaca

SEQ ID NO: 33314 - DNA, 21 bp, Artificial Sequence
  source: /note="Description of Artificial Sequence: Synthetic oligonucleotide"
ctcgcagacagaagaatcgaa

SEQ ID NO: 33315 - DNA, 21 bp, Artificial Sequence
  source: /note="Description of Artificial Sequence: Synthetic oligonucleotide"
ctcgcagaagcagtcacaagc

SEQ ID NO: 33316 - DNA, 21 bp, Artificial Sequence
  source: /note="Description of Artificial Sequence: Synthetic oligonucleotide"
ctcgcagaagaactcggaaga

SEQ ID NO: 33317 - DNA, 21 bp, Artificial Sequence
  source: /note="Description of Artificial Sequence: Synthetic oligonucleotide"
ctcgcagaaaacagcagaaca

SEQ ID NO: 33318 - DNA, 21 bp, Artificial Sequence
  source: /note="Description of Artificial Sequence: Synthetic oligonucleotide"
ctcgcagaaagcagaggatac

SEQ ID NO: 33319 - DNA, 21 bp, Artificial Sequence
  source: /note="Description of Artificial Sequence: Synthetic oligonucleotide"
ctcgcagaagtcatctacgac

SEQ ID NO: 33320 - DNA, 21 bp, Artificial Sequence
  source: /note="Description of Artificial Sequence: Synthetic oligonucleotide"
ctcgcaggagcactccaagaa

SEQ ID NO: 33321 - DNA, 21 bp, Artificial Sequence
  source: /note="Description of Artificial Sequence: Synthetic oligonucleotide"
ctcgcaggagacagacaatgg

SEQ ID NO: 33322 - DNA, 21 bp, Artificial Sequence
  source: /note="Description of Artificial Sequence: Synthetic oligonucleotide"
ctcgcaggacacctcatgcca

SEQ ID NO: 33323 - DNA, 21 bp, Artificial Sequence
  source: /note="Description of Artificial Sequence: Synthetic oligonucleotide"
ctcgcaggaaaaggactcctc

SEQ ID NO: 33324 - DNA, 21 bp, Artificial Sequence
  source: /note="Description of Artificial Sequence: Synthetic oligonucleotide"
ctcgcaggaaaaaacatcgca

SEQ ID NO: 33325 - DNA, 21 bp, Artificial Sequence
  source: /note="Description of Artificial Sequence: Synthetic oligonucleotide"
ctcgcaggactcggacacctc

SEQ ID NO: 33326 - DNA, 21 bp, Artificial Sequence
  source: /note="Description of Artificial Sequence: Synthetic oligonucleotide"
ctcgcaggactcgtcagaaac

SEQ ID NO: 33327 - DNA, 21 bp, Artificial Sequence
  source: /note="Description of Artificial Sequence: Synthetic oligonucleotide"
ctcgcacacggaacaggactc

SEQ ID NO: 33328 - DNA, 21 bp, Artificial Sequence
  source: /note="Description of Artificial Sequence: Synthetic oligonucleotide"
ctcgcacacaaagcaaacagc

SEQ ID NO: 33329 - DNA, 21 bp, Artificial Sequence
  source: /note="Description of Artificial Sequence: Synthetic oligonucleotide"
ctcgcacacaaaggaatcgtc

SEQ ID NO: 33330 - DNA, 21 bp, Artificial Sequence
  source: /note="Description of Artificial Sequence: Synthetic oligonucleotide"
ctcgcacacccagtccaattc

SEQ ID NO: 33331 - DNA, 21 bp, Artificial Sequence
  source: /note="Description of Artificial Sequence: Synthetic oligonucleotide"
ctcgcacacagcacaagcgtc

SEQ ID NO: 33332 - DNA, 21 bp, Artificial Sequence
  source: /note="Description of Artificial Sequence: Synthetic oligonucleotide"
ctcgcaatcgacccagcagac

SEQ ID NO: 33333 - DNA, 21 bp, Artificial Sequence
  source: /note="Description of Artificial Sequence: Synthetic oligonucleotide"
ctcgcaatcggaccactcaga

SEQ ID NO: 33334 - DNA, 21 bp, Artificial Sequence
  source: /note="Description of Artificial Sequence: Synthetic oligonucleotide"
ctcgcaaaattcgcaccagac

SEQ ID NO: 33335 - DNA, 21 bp, Artificial Sequence
  source: /note="Description of Artificial Sequence: Synthetic oligonucleotide"
ctcgcaaaaagcctccaagca

SEQ ID NO: 33336 - DNA, 21 bp, Artificial Sequence
  source: /note="Description of Artificial Sequence: Synthetic oligonucleotide"
ctcgcactcgcaggaagcgac

SEQ ID NO: 33337 - DNA, 21 bp, Artificial Sequence
  source: /note="Description of Artificial Sequence: Synthetic oligonucleotide"
ctcgcactcggagtcctcaga

SEQ ID NO: 33338 - DNA, 21 bp, Artificial Sequence
  source: /note="Description of Artificial Sequence: Synthetic oligonucleotide"
ctcgcactcggagtcccatac

SEQ ID NO: 33339 - DNA, 21 bp, Artificial Sequence
  source: /note="Description of Artificial Sequence: Synthetic oligonucleotide"
ctcgcactcaaaatcagcagc

SEQ ID NO: 33340 - DNA, 21 bp, Artificial Sequence
  source: /note="Description of Artificial Sequence: Synthetic oligonucleotide"
ctcgcactcaaaagccaccca

SEQ ID NO: 33341 - DNA, 21 bp, Artificial Sequence
  source: /note="Description of Artificial Sequence: Synthetic oligonucleotide"
ctcgcactcaaaagcagagac

SEQ ID NO: 33342 - DNA, 21 bp, Artificial Sequence
  source: /note="Description of Artificial Sequence: Synthetic oligonucleotide"
ctcgcactcccagcacacgca

SEQ ID NO: 33343 - DNA, 21 bp, Artificial Sequence
  source: /note="Description of Artificial Sequence: Synthetic oligonucleotide"
ctcgcactcagaggaccagga

SEQ ID NO: 33344 - DNA, 21 bp, Artificial Sequence
  source: /note="Description of Artificial Sequence: Synthetic oligonucleotide"
ctcgcactcagcggaaacaca

SEQ ID NO: 33345 - DNA, 21 bp, Artificial Sequence
  source: /note="Description of Artificial Sequence: Synthetic oligonucleotide"
ctcgcactcgtcacagacaga

SEQ ID NO: 33346 - DNA, 21 bp, Artificial Sequence
  source: /note="Description of Artificial Sequence: Synthetic oligonucleotide"
ctcgcaatgggaggaatcaga

SEQ ID NO: 33347 - DNA, 21 bp, Artificial Sequence
  source: /note="Description of Artificial Sequence: Synthetic oligonucleotide"
ctcgcaatgcaaagcagaaac

SEQ ID NO: 33348 - DNA, 21 bp, Artificial Sequence
  source: /note="Description of Artificial Sequence: Synthetic oligonucleotide"
ctcgcaaacggaaacccagca

SEQ ID NO: 33349 - DNA, 21 bp, Artificial Sequence
  source: /note="Description of Artificial Sequence: Synthetic oligonucleotide"
ctcgcaaacatcgcaacaaaa

SEQ ID NO: 33350 - DNA, 21 bp, Artificial Sequence
  source: /note="Description of Artificial Sequence: Synthetic oligonucleotide"
ctcgcaaacaaaatcccacca

SEQ ID NO: 33351 - DNA, 21 bp, Artificial Sequence
  source: /note="Description of Artificial Sequence: Synthetic oligonucleotide"
ctcgcaaacaaaagcatgagc

SEQ ID NO: 33352 - DNA, 21 bp, Artificial Sequence
  source: /note="Description of Artificial Sequence: Synthetic oligonucleotide"
ctcgcaaacccagcaaacgga

SEQ ID NO: 33353 - DNA, 21 bp, Artificial Sequence
  source: /note="Description of Artificial Sequence: Synthetic oligonucleotide"
ctcgcaaacccactcggaaga

SEQ ID NO: 33354 - DNA, 21 bp, Artificial Sequence
  source: /note="Description of Artificial Sequence: Synthetic oligonucleotide"
ctcgcaaacccaatgagcgca

SEQ ID NO: 33355 - DNA, 21 bp, Artificial Sequence
  source: /note="Description of Artificial Sequence: Synthetic oligonucleotide"
ctcgcaaacagcttcgtcgca

SEQ ID NO: 33356 - DNA, 21 bp, Artificial Sequence
  source: /note="Description of Artificial Sequence: Synthetic oligonucleotide"
ctcgcaaacagcaaaagcctc

SEQ ID NO: 33357 - DNA, 21 bp, Artificial Sequence
  source: /note="Description of Artificial Sequence: Synthetic oligonucleotide"
ctcgcaaacgtcagagcaagc

SEQ ID NO: 33358 - DNA, 21 bp, Artificial Sequence
  source: /note="Description of Artificial Sequence: Synthetic oligonucleotide"
ctcgcaccaggactcgcaatg

SEQ ID NO: 33359 - DNA, 21 bp, Artificial Sequence
  source: /note="Description of Artificial Sequence: Synthetic oligonucleotide"
ctcgcaccacacacaagcagc

SEQ ID NO: 33360 - DNA, 21 bp, Artificial Sequence
  source: /note="Description of Artificial Sequence: Synthetic oligonucleotide"
ctcgcaccactcagcaaagtc

SEQ ID NO: 33361 - DNA, 21 bp, Artificial Sequence
  source: /note="Description of Artificial Sequence: Synthetic oligonucleotide"
ctcgcaccaccactcagacaa

SEQ ID NO: 33362 - DNA, 21 bp, Artificial Sequence
  source: /note="Description of Artificial Sequence: Synthetic oligonucleotide"
ctcgcaccaagctacctccca

SEQ ID NO: 33363 - DNA, 21 bp, Artificial Sequence
  source: /note="Description of Artificial Sequence: Synthetic oligonucleotide"
ctcgcaccaacactcacacca

SEQ ID NO: 33364 - DNA, 21 bp, Artificial Sequence
  source: /note="Description of Artificial Sequence: Synthetic oligonucleotide"
ctcgcacaaggaagcatcagc

SEQ ID NO: 33365 - DNA, 21 bp, Artificial Sequence
  source: /note="Description of Artificial Sequence: Synthetic oligonucleotide"
ctcgcacaacaaaaagacaca

SEQ ID NO: 33366 - DNA, 21 bp, Artificial Sequence
  source: /note="Description of Artificial Sequence: Synthetic oligonucleotide"
ctcgcacaaagaccacaccaa

SEQ ID NO: 33367 - DNA, 21 bp, Artificial Sequence
  source: /note="Description of Artificial Sequence: Synthetic oligonucleotide"
ctcgcacaaagcagcagcaga

SEQ ID NO: 33368 - DNA, 21 bp, Artificial Sequence
  source: /note="Description of Artificial Sequence: Synthetic oligonucleotide"
ctcgcacaagtcagcgcaagc

SEQ ID NO: 33369 - DNA, 21 bp, Artificial Sequence
  source: /note="Description of Artificial Sequence: Synthetic oligonucleotide"
ctcgcaagaggaccaggagac

SEQ ID NO: 33370 - DNA, 21 bp, Artificial Sequence
  source: /note="Description of Artificial Sequence: Synthetic oligonucleotide"
ctcgcaagactcagcccaaca

SEQ ID NO: 33371 - DNA, 21 bp, Artificial Sequence
  source: /note="Description of Artificial Sequence: Synthetic oligonucleotide"
ctcgcaagacaaagcccagaa

SEQ ID NO: 33372 - DNA, 21 bp, Artificial Sequence
  source: /note="Description of Artificial Sequence: Synthetic oligonucleotide"
ctcgcaagacaaacaagcagc

SEQ ID NO: 33373 - DNA, 21 bp, Artificial Sequence
  source: /note="Description of Artificial Sequence: Synthetic oligonucleotide"
ctcgcaagaagcccaacactc

SEQ ID NO: 33374 - DNA, 21 bp, Artificial Sequence
  source: /note="Description of Artificial Sequence: Synthetic oligonucleotide"
ctcgcaagagtcaacagcagc

SEQ ID NO: 33375 - DNA, 21 bp, Artificial Sequence
  source: /note="Description of Artificial Sequence: Synthetic oligonucleotide"
ctcgcaagagtcagccaaaca

SEQ ID NO: 33376 - DNA, 21 bp, Artificial Sequence
  source: /note="Description of Artificial Sequence: Synthetic oligonucleotide"
ctcgcaagcgcaatgaaaaca

SEQ ID NO: 33377 - DNA, 21 bp, Artificial Sequence
  source: /note="Description of Artificial Sequence: Synthetic oligonucleotide"
ctcgcaagcgcagtccaaagc

SEQ ID NO: 33378 - DNA, 21 bp, Artificial Sequence
  source: /note="Description of Artificial Sequence: Synthetic oligonucleotide"
ctcgcaagcgacagcagagca

SEQ ID NO: 33379 - DNA, 21 bp, Artificial Sequence
  source: /note="Description of Artificial Sequence: Synthetic oligonucleotide"
ctcgcaagcgaattcatcgca

SEQ ID NO: 33380 - DNA, 21 bp, Artificial Sequence
  source: /note="Description of Artificial Sequence: Synthetic oligonucleotide"
ctcgcaagcgaaaaagtcagc

SEQ ID NO: 33381 - DNA, 21 bp, Artificial Sequence
  source: /note="Description of Artificial Sequence: Synthetic oligonucleotide"
ctcgcaagcctcgtcagcgtc

SEQ ID NO: 33382 - DNA, 21 bp, Artificial Sequence
  source: /note="Description of Artificial Sequence: Synthetic oligonucleotide"
ctcgcaagcccaacagactac

SEQ ID NO: 33383 - DNA, 21 bp, Artificial Sequence
  source: /note="Description of Artificial Sequence: Synthetic oligonucleotide"
ctcgcaagccaaggattcaac

SEQ ID NO: 33384 - DNA, 21 bp, Artificial Sequence
  source: /note="Description of Artificial Sequence: Synthetic oligonucleotide"
ctcgcaagccaaggaccagga

SEQ ID NO: 33385 - DNA, 21 bp, Artificial Sequence
  source: /note="Description of Artificial Sequence: Synthetic oligonucleotide"
ctcgcaagcagaccagcacac

SEQ ID NO: 33386 - DNA, 21 bp, Artificial Sequence
  source: /note="Description of Artificial Sequence: Synthetic oligonucleotide"
ctcgcaagcgtcaacacaagc

SEQ ID NO: 33387 - DNA, 21 bp, Artificial Sequence
  source: /note="Description of Artificial Sequence: Synthetic oligonucleotide"
ctcgcaacagcacacagacca

SEQ ID NO: 33388 - DNA, 21 bp, Artificial Sequence
  source: /note="Description of Artificial Sequence: Synthetic oligonucleotide"
ctcgcaacagcagtcgtcgac

SEQ ID NO: 33389 - DNA, 21 bp, Artificial Sequence
  source: /note="Description of Artificial Sequence: Synthetic oligonucleotide"
ctcgcaacaaaaagctacaca

SEQ ID NO: 33390 - DNA, 21 bp, Artificial Sequence
  source: /note="Description of Artificial Sequence: Synthetic oligonucleotide"
ctcgcaacaccaccaatcatc

SEQ ID NO: 33391 - DNA, 21 bp, Artificial Sequence
  source: /note="Description of Artificial Sequence: Synthetic oligonucleotide"
ctcgcaacaagacaagtcgga

SEQ ID NO: 33392 - DNA, 21 bp, Artificial Sequence
  source: /note="Description of Artificial Sequence: Synthetic oligonucleotide"
ctcgcaacaagagtcagagaa

SEQ ID NO: 33393 - DNA, 21 bp, Artificial Sequence
  source: /note="Description of Artificial Sequence: Synthetic oligonucleotide"
ctcgcaacaagcccactccac

SEQ ID NO: 33394 - DNA, 21 bp, Artificial Sequence
  source: /note="Description of Artificial Sequence: Synthetic oligonucleotide"
ctcgcaacaagcccaaaccac

SEQ ID NO: 33395 - DNA, 21 bp, Artificial Sequence
  source: /note="Description of Artificial Sequence: Synthetic oligonucleotide"
ctcgcaacaagcagaagcctc

SEQ ID NO: 33396 - DNA, 21 bp, Artificial Sequence
  source: /note="Description of Artificial Sequence: Synthetic oligonucleotide"
ctcgcaacaacaagcggagca

SEQ ID NO: 33397 - DNA, 21 bp, Artificial Sequence
  source: /note="Description of Artificial Sequence: Synthetic oligonucleotide"
ctcgcagtcgaaaaactccca

SEQ ID NO: 33398 - DNA, 21 bp, Artificial Sequence
  source: /note="Description of Artificial Sequence: Synthetic oligonucleotide"
ctcgcagtcggaacaaaagga

SEQ ID NO: 33399 - DNA, 21 bp, Artificial Sequence
  source: /note="Description of Artificial Sequence: Synthetic oligonucleotide"
ctcgcagtcagcccaatgcca

SEQ ID NO: 33400 - DNA, 21 bp, Artificial Sequence
  source: /note="Description of Artificial Sequence: Synthetic oligonucleotide"
ctcgcagtcgtcgaaagcctc

SEQ ID NO: 33401 - DNA, 21 bp, Artificial Sequence
  source: /note="Description of Artificial Sequence: Synthetic oligonucleotide"
ctctgcagaaacagccacagc

SEQ ID NO: 33402 - DNA, 21 bp, Artificial Sequence
  source: /note="Description of Artificial Sequence: Synthetic oligonucleotide"
ctcgacgcaagaagattcttc

SEQ ID NO: 33403 - DNA, 21 bp, Artificial Sequence
  source: /note="Description of Artificial Sequence: Synthetic oligonucleotide"
ctcgacgacccaggaggatgc

SEQ ID NO: 33404 - DNA, 21 bp, Artificial Sequence
  source: /note="Description of Artificial Sequence: Synthetic oligonucleotide"
ctcgacgacagcagcctcctc

SEQ ID NO: 33405 - DNA, 21 bp, Artificial Sequence
  source: /note="Description of Artificial Sequence: Synthetic oligonucleotide"
ctcgacgacgtcatgccagga

SEQ ID NO: 33406 - DNA, 21 bp, Artificial Sequence
  source: /note="Description of Artificial Sequence: Synthetic oligonucleotide"
ctcgacgaaagatggccaaca

SEQ ID NO: 33407 - DNA, 21 bp, Artificial Sequence
  source: /note="Description of Artificial Sequence: Synthetic oligonucleotide"
ctcgacttcccagcaagcagc

SEQ ID NO: 33408 - DNA, 21 bp, Artificial Sequence
  source: /note="Description of Artificial Sequence: Synthetic oligonucleotide"
ctcgacttcagagaagacagc

SEQ ID NO: 33409 - DNA, 21 bp, Artificial Sequence
  source: /note="Description of Artificial Sequence: Synthetic oligonucleotide"
ctcgacggaggaagcacaaga

SEQ ID NO: 33410 - DNA, 21 bp, Artificial Sequence
  source: /note="Description of Artificial Sequence: Synthetic oligonucleotide"
ctcgacggacaaatgctcgca

SEQ ID NO: 33411 - DNA, 21 bp, Artificial Sequence
  source: /note="Description of Artificial Sequence: Synthetic oligonucleotide"
ctcgacggaagaccactcgtc

SEQ ID NO: 33412 - DNA, 21 bp, Artificial Sequence
  source: /note="Description of Artificial Sequence: Synthetic oligonucleotide"
ctcgacatcgaaagacacagc

SEQ ID NO: 33413 - DNA, 21 bp, Artificial Sequence
  source: /note="Description of Artificial Sequence: Synthetic oligonucleotide"
ctcgacatcacaaacgtcaaa

SEQ ID NO: 33414 - DNA, 21 bp, Artificial Sequence
  source: /note="Description of Artificial Sequence: Synthetic oligonucleotide"
ctcgacaaattcaacagcaaa

SEQ ID NO: 33415 - DNA, 21 bp, Artificial Sequence
  source: /note="Description of Artificial Sequence: Synthetic oligonucleotide"
ctcgacaaaaaacaccaaagc

SEQ ID NO: 33416 - DNA, 21 bp, Artificial Sequence
  source: /note="Description of Artificial Sequence: Synthetic oligonucleotide"
ctcgacaaaatgagaacaaca

SEQ ID NO: 33417 - DNA, 21 bp, Artificial Sequence
  source: /note="Description of Artificial Sequence: Synthetic oligonucleotide"
ctcgacaaaagagacatcctc

SEQ ID NO: 33418 - DNA, 21 bp, Artificial Sequence
  source: /note="Description of Artificial Sequence: Synthetic oligonucleotide"
ctcgacaaaacaagcagactc

SEQ ID NO: 33419 - DNA, 21 bp, Artificial Sequence
  source: /note="Description of Artificial Sequence: Synthetic oligonucleotide"
ctcgacctcgcaaacagcatg

SEQ ID NO: 33420 - DNA, 21 bp, Artificial Sequence
  source: /note="Description of Artificial Sequence: Synthetic oligonucleotide"
ctcgacctccacctccaagca

SEQ ID NO: 33421 - DNA, 21 bp, Artificial Sequence
  source: /note="Description of Artificial Sequence: Synthetic oligonucleotide"
ctcgacctcaaaagcgtcatg

SEQ ID NO: 33422 - DNA, 21 bp, Artificial Sequence
  source: /note="Description of Artificial Sequence: Synthetic oligonucleotide"
ctcgacctccaaacaacaaaa

SEQ ID NO: 33423 - DNA, 21 bp, Artificial Sequence
  source: /note="Description of Artificial Sequence: Synthetic oligonucleotide"
ctcgacctcgtcgcattcgaa

SEQ ID NO: 33424 - DNA, 21 bp, Artificial Sequence
  source: /note="Description of Artificial Sequence: Synthetic oligonucleotide"
ctcgacatgagagacagcgga

SEQ ID NO: 33425 - DNA, 21 bp, Artificial Sequence
  source: /note="Description of Artificial Sequence: Synthetic oligonucleotide"
ctcgacatgagaacacaagga

SEQ ID NO: 33426 - DNA, 21 bp, Artificial Sequence
  source: /note="Description of Artificial Sequence: Synthetic oligonucleotide"
ctcgacaacccacaccacgtc

SEQ ID NO: 33427 - DNA, 21 bp, Artificial Sequence
  source: /note="Description of Artificial Sequence: Synthetic oligonucleotide"
ctcgacaacccagtcagcgca

SEQ ID NO: 33428 - DNA, 21 bp, Artificial Sequence
  source: /note="Description of Artificial Sequence: Synthetic oligonucleotide"
ctcgacccagacgcaagaaga

SEQ ID NO: 33429 - DNA, 21 bp, Artificial Sequence
  source: /note="Description of Artificial Sequence: Synthetic oligonucleotide"
ctcgacccaggactcaaaagc

SEQ ID NO: 33430 - DNA, 21 bp, Artificial Sequence
  source: /note="Description of Artificial Sequence: Synthetic oligonucleotide"
ctcgacagactcagcagcatc

SEQ ID NO: 33431 - DNA, 21 bp, Artificial Sequence
  source: /note="Description of Artificial Sequence: Synthetic oligonucleotide"
ctcgacagactcgtcacagga

SEQ ID NO: 33432 - DNA, 21 bp, Artificial Sequence
  source: /note="Description of Artificial Sequence: Synthetic oligonucleotide"
ctcgacagaatggtcgtcgga

SEQ ID NO: 33433 - DNA, 21 bp, Artificial Sequence
  source: /note="Description of Artificial Sequence: Synthetic oligonucleotide"
ctcgacagaccaagcgcatgg

SEQ ID NO: 33434 - DNA, 21 bp, Artificial Sequence
  source: /note="Description of Artificial Sequence: Synthetic oligonucleotide"
ctcgacagaagaccaatccaa

SEQ ID NO: 33435 - DNA, 21 bp, Artificial Sequence
  source: /note="Description of Artificial Sequence: Synthetic oligonucleotide"
ctcgacagaagaccaatgctc

SEQ ID NO: 33436 - DNA, 21 bp, Artificial Sequence
  source: /note="Description of Artificial Sequence: Synthetic oligonucleotide"
ctcgacagatacacaccacca

SEQ ID NO: 33437 - DNA, 21 bp, Artificial Sequence
  source: /note="Description of Artificial Sequence: Synthetic oligonucleotide"
ctcgacagcggaagaccaagc

SEQ ID NO: 33438 - DNA, 21 bp, Artificial Sequence
  source: /note="Description of Artificial Sequence: Synthetic oligonucleotide"
ctcgacagcctccacatccca

SEQ ID NO: 33439 - DNA, 21 bp, Artificial Sequence
  source: /note="Description of Artificial Sequence: Synthetic oligonucleotide"
ctcgacagcaacgtcacaagc

SEQ ID NO: 33440 - DNA, 21 bp, Artificial Sequence
  source: /note="Description of Artificial Sequence: Synthetic oligonucleotide"
ctcgacagcccagcaatggca

SEQ ID NO: 33441 - DNA, 21 bp, Artificial Sequence
  source: /note="Description of Artificial Sequence: Synthetic oligonucleotide"
ctcgacagcccaccaaacaac

SEQ ID NO: 33442 - DNA, 21 bp, Artificial Sequence
  source: /note="Description of Artificial Sequence: Synthetic oligonucleotide"
ctcgacagcagccacggacac

SEQ ID NO: 33443 - DNA, 21 bp, Artificial Sequence
  source: /note="Description of Artificial Sequence: Synthetic oligonucleotide"
ctcgacagcagcagaagcagc

SEQ ID NO: 33444 - DNA, 21 bp, Artificial Sequence
  source: /note="Description of Artificial Sequence: Synthetic oligonucleotide"
ctcgacagcagctggacacca

SEQ ID NO: 33445 - DNA, 21 bp, Artificial Sequence
  source: /note="Description of Artificial Sequence: Synthetic oligonucleotide"
ctcgacagcacaccaagacca

SEQ ID NO: 33446 - DNA, 21 bp, Artificial Sequence
  source: /note="Description of Artificial Sequence: Synthetic oligonucleotide"
ctcgacacacaagcaggaaga

SEQ ID NO: 33447 - DNA, 21 bp, Artificial Sequence
  source: /note="Description of Artificial Sequence: Synthetic oligonucleotide"
ctcgacacacaaagcagactc

SEQ ID NO: 33448 - DNA, 21 bp, Artificial Sequence
  source: /note="Description of Artificial Sequence: Synthetic oligonucleotide"
ctcgacacaagaggaatcagc

SEQ ID NO: 33449 - DNA, 21 bp, Artificial Sequence
  source: /note="Description of Artificial Sequence: Synthetic oligonucleotide"
ctcgacacaagatacagatac

SEQ ID NO: 33450 - DNA, 21 bp, Artificial Sequence
  source: /note="Description of Artificial Sequence: Synthetic oligonucleotide"
ctcgacacagtccaaagcaaa

SEQ ID NO: 33451 - DNA, 21 bp, Artificial Sequence
  source: /note="Description of Artificial Sequence: Synthetic oligonucleotide"
ctcgacgtcgcaacaagcaga

SEQ ID NO: 33452 - DNA, 21 bp, Artificial Sequence
  source: /note="Description of Artificial Sequence: Synthetic oligonucleotide"
ctcgacgtcaaatgcgaccca

SEQ ID NO: 33453 - DNA, 21 bp, Artificial Sequence
  source: /note="Description of Artificial Sequence: Synthetic oligonucleotide"
ctcgacgtcctcgactgcaaa

SEQ ID NO: 33454 - DNA, 21 bp, Artificial Sequence
  source: /note="Description of Artificial Sequence: Synthetic oligonucleotide"
ctcgacgtcaacggactcaga

SEQ ID NO: 33455 - DNA, 21 bp, Artificial Sequence
  source: /note="Description of Artificial Sequence: Synthetic oligonucleotide"
ctcgacgtcagccaaagactc

SEQ ID NO: 33456 - DNA, 21 bp, Artificial Sequence
  source: /note="Description of Artificial Sequence: Synthetic oligonucleotide"
ctcgacgtcgtcacaagagtc

SEQ ID NO: 33457 - DNA, 21 bp, Artificial Sequence
  source: /note="Description of Artificial Sequence: Synthetic oligonucleotide"
ctcgacgtctacagcagagaa

SEQ ID NO: 33458 - DNA, 21 bp, Artificial Sequence
  source: /note="Description of Artificial Sequence: Synthetic oligonucleotide"
ctcgaagcaaacctcaaagtc

SEQ ID NO: 33459 - DNA, 21 bp, Artificial Sequence
  source: /note="Description of Artificial Sequence: Synthetic oligonucleotide"
ctcgaagcaccaagagcaaca

SEQ ID NO: 33460 - DNA, 21 bp, Artificial Sequence
  source: /note="Description of Artificial Sequence: Synthetic oligonucleotide"
ctcgaagaagacaaagtcaaa

SEQ ID NO: 33461 - DNA, 21 bp, Artificial Sequence
  source: /note="Description of Artificial Sequence: Synthetic oligonucleotide"
ctcgaattcgacagcaaagaa

SEQ ID NO: 33462 - DNA, 21 bp, Artificial Sequence
  source: /note="Description of Artificial Sequence: Synthetic oligonucleotide"
ctcgaattcggaagcgaccaa

SEQ ID NO: 33463 - DNA, 21 bp, Artificial Sequence
  source: /note="Description of Artificial Sequence: Synthetic oligonucleotide"
ctcgaattcacaagaatcgga

SEQ ID NO: 33464 - DNA, 21 bp, Artificial Sequence
  source: /note="Description of Artificial Sequence: Synthetic oligonucleotide"
ctcgaaggaacaagaagagac

SEQ ID NO: 33465 - DNA, 21 bp, Artificial Sequence
  source: /note="Description of Artificial Sequence: Synthetic oligonucleotide"
ctcgaaggagtcagaggaagc

SEQ ID NO: 33466 - DNA, 21 bp, Artificial Sequence
  source: /note="Description of Artificial Sequence: Synthetic oligonucleotide"
ctcgaacacctcagaagcgca

SEQ ID NO: 33467 - DNA, 21 bp, Artificial Sequence
  source: /note="Description of Artificial Sequence: Synthetic oligonucleotide"
ctcgaacacagcgcacacgtc

SEQ ID NO: 33468 - DNA, 21 bp, Artificial Sequence
  source: /note="Description of Artificial Sequence: Synthetic oligonucleotide"
ctcgaacacagcgtcagcctc

SEQ ID NO: 33469 - DNA, 21 bp, Artificial Sequence
  source: /note="Description of Artificial Sequence: Synthetic oligonucleotide"
ctcgaaatcacaggaccagga

SEQ ID NO: 33470 - DNA, 21 bp, Artificial Sequence
  source: /note="Description of Artificial Sequence: Synthetic oligonucleotide"
ctcgaaaaaatgggactctac

SEQ ID NO: 33471 - DNA, 21 bp, Artificial Sequence
  source: /note="Description of Artificial Sequence: Synthetic oligonucleotide"
ctcgaaaaacaaacaggagac

SEQ ID NO: 33472 - DNA, 21 bp, Artificial Sequence
  source: /note="Description of Artificial Sequence: Synthetic oligonucleotide"
ctcgaactcaaaccagcaaac

SEQ ID NO: 33473 - DNA, 21 bp, Artificial Sequence
  source: /note="Description of Artificial Sequence: Synthetic oligonucleotide"
ctcgaaatgagaggactcgca

SEQ ID NO: 33474 - DNA, 21 bp, Artificial Sequence
  source: /note="Description of Artificial Sequence: Synthetic oligonucleotide"
ctcgaaaacgcacaaacacca

SEQ ID NO: 33475 - DNA, 21 bp, Artificial Sequence
  source: /note="Description of Artificial Sequence: Synthetic oligonucleotide"
ctcgaaaacgactggagagtc

SEQ ID NO: 33476 - DNA, 21 bp, Artificial Sequence
  source: /note="Description of Artificial Sequence: Synthetic oligonucleotide"
ctcgaaaaccacccagacaga

SEQ ID NO: 33477 - DNA, 21 bp, Artificial Sequence
  source: /note="Description of Artificial Sequence: Synthetic oligonucleotide"
ctcgaaaacaacccagcactc

SEQ ID NO: 33478 - DNA, 21 bp, Artificial Sequence
  source: /note="Description of Artificial Sequence: Synthetic oligonucleotide"
ctcgaaaacagccacctcgtc

SEQ ID NO: 33479 - DNA, 21 bp, Artificial Sequence
  source: /note="Description of Artificial Sequence: Synthetic oligonucleotide"
ctcgaaccaatcgtcagaaac

SEQ ID NO: 33480 - DNA, 21 bp, Artificial Sequence
  source: /note="Description of Artificial Sequence: Synthetic oligonucleotide"
ctcgaaccacaaacacacagc

SEQ ID NO: 33481 - DNA, 21 bp, Artificial Sequence
  source: /note="Description of Artificial Sequence: Synthetic oligonucleotide"
ctcgaaccaagccacacaatc

SEQ ID NO: 33482 - DNA, 21 bp, Artificial Sequence
  source: /note="Description of Artificial Sequence: Synthetic oligonucleotide"
ctcgaaccatacaaacacttc

SEQ ID NO: 33483 - DNA, 21 bp, Artificial Sequence
  source: /note="Description of Artificial Sequence: Synthetic oligonucleotide"
ctcgaacaattcagcacagca

SEQ ID NO: 33484 - DNA, 21 bp, Artificial Sequence
  source: /note="Description of Artificial Sequence: Synthetic oligonucleotide"
ctcgaacaaccaccagaacac

SEQ ID NO: 33485 - DNA, 21 bp, Artificial Sequence
  source: /note="Description of Artificial Sequence: Synthetic oligonucleotide"
ctcgaacaatacaacaaagaa

SEQ ID NO: 33486 - DNA, 21 bp, Artificial Sequence
  source: /note="Description of Artificial Sequence: Synthetic oligonucleotide"
ctcgaaagaggaagcagcgaa

SEQ ID NO: 33487 - DNA, 21 bp, Artificial Sequence
  source: /note="Description of Artificial Sequence: Synthetic oligonucleotide"
ctcgaaagaatcagcagcgtc

SEQ ID NO: 33488 - DNA, 21 bp, Artificial Sequence
  source: /note="Description of Artificial Sequence: Synthetic oligonucleotide"
ctcgaaagcgcactcagcagc

SEQ ID NO: 33489 - DNA, 21 bp, Artificial Sequence
  source: /note="Description of Artificial Sequence: Synthetic oligonucleotide"
ctcgaaagcgcatggatcgga

SEQ ID NO: 33490 - DNA, 21 bp, Artificial Sequence
  source: /note="Description of Artificial Sequence: Synthetic oligonucleotide"
ctcgaaagcaaaccaagccca

SEQ ID NO: 33491 - DNA, 21 bp, Artificial Sequence
  source: /note="Description of Artificial Sequence: Synthetic oligonucleotide"
ctcgaaagcaacaactacctc

SEQ ID NO: 33492 - DNA, 21 bp, Artificial Sequence
  source: /note="Description of Artificial Sequence: Synthetic oligonucleotide"
ctcgaaagccaaacaagaaac

SEQ ID NO: 33493 - DNA, 21 bp, Artificial Sequence
  source: /note="Description of Artificial Sequence: Synthetic oligonucleotide"
ctcgaaagcagaagcggaatg

SEQ ID NO: 33494 - DNA, 21 bp, Artificial Sequence
  source: /note="Description of Artificial Sequence: Synthetic oligonucleotide"
ctcgaaagcagccacacaaga

SEQ ID NO: 33495 - DNA, 21 bp, Artificial Sequence
  source: /note="Description of Artificial Sequence: Synthetic oligonucleotide"
ctcgaaagcagcgtcagagtc

SEQ ID NO: 33496 - DNA, 21 bp, Artificial Sequence
  source: /note="Description of Artificial Sequence: Synthetic oligonucleotide"
ctcgaaacagcaagcacaaaa

SEQ ID NO: 33497 - DNA, 21 bp, Artificial Sequence
  source: /note="Description of Artificial Sequence: Synthetic oligonucleotide"
ctcgaaacaagacaaatcgga

SEQ ID NO: 33498 - DNA, 21 bp, Artificial Sequence
  source: /note="Description of Artificial Sequence: Synthetic oligonucleotide"
ctcgaaacaagcgacagcgtc

SEQ ID NO: 33499 - DNA, 21 bp, Artificial Sequence
  source: /note="Description of Artificial Sequence: Synthetic oligonucleotide"
ctcgaagtcgcactcagaaca

SEQ ID NO: 33500 - DNA, 21 bp, Artificial Sequence
  source: /note="Description of Artificial Sequence: Synthetic oligonucleotide"
ctcgaagtcgcaagcaaccca

SEQ ID NO: 33501 - DNA, 21 bp, Artificial Sequence
  source: /note="Description of Artificial Sequence: Synthetic oligonucleotide"
ctcgaagtcacagaaccatgg

SEQ ID NO: 33502 - DNA, 21 bp, Artificial Sequence
  source: /note="Description of Artificial Sequence: Synthetic oligonucleotide"
ctcttcgcaatcagcgtccca

SEQ ID NO: 33503 - DNA, 21 bp, Artificial Sequence
  source: /note="Description of Artificial Sequence: Synthetic oligonucleotide"
ctcttcgcaaacacaatcagc

SEQ ID NO: 33504 - DNA, 21 bp, Artificial Sequence
  source: /note="Description of Artificial Sequence: Synthetic oligonucleotide"
ctcttcgacgcagcactccca

SEQ ID NO: 33505 - DNA, 21 bp, Artificial Sequence
  source: /note="Description of Artificial Sequence: Synthetic oligonucleotide"
ctcttcgacttcacaaaagaa

SEQ ID NO: 33506 - DNA, 21 bp, Artificial Sequence
  source: /note="Description of Artificial Sequence: Synthetic oligonucleotide"
ctcttcgacccaaacagagga

SEQ ID NO: 33507 - DNA, 21 bp, Artificial Sequence
  source: /note="Description of Artificial Sequence: Synthetic oligonucleotide"
ctcttcgacagaacagcactc

SEQ ID NO: 33508 - DNA, 21 bp, Artificial Sequence
  source: /note="Description of Artificial Sequence: Synthetic oligonucleotide"
ctcttcgacagcagcacaaca

SEQ ID NO: 33509 - DNA, 21 bp, Artificial Sequence
  source: /note="Description of Artificial Sequence: Synthetic oligonucleotide"
ctcttcgaactccaacacaga

SEQ ID NO: 33510 - DNA, 21 bp, Artificial Sequence
  source: /note="Description of Artificial Sequence: Synthetic oligonucleotide"
ctcttcttcacagcagcacca

SEQ ID NO: 33511 - DNA, 21 bp, Artificial Sequence
  source: /note="Description of Artificial Sequence: Synthetic oligonucleotide"
ctcttcggaaaagtcagcgga

SEQ ID NO: 33512 - DNA, 21 bp, Artificial Sequence
  source: /note="Description of Artificial Sequence: Synthetic oligonucleotide"
ctcttcggaagcagaccaaca

SEQ ID NO: 33513 - DNA, 21 bp, Artificial Sequence
  source: /note="Description of Artificial Sequence: Synthetic oligonucleotide"
ctcttcggaacaaacagaagc

SEQ ID NO: 33514 - DNA, 21 bp, Artificial Sequence
  source: /note="Description of Artificial Sequence: Synthetic oligonucleotide"
ctcttccacgaaagcacatac

SEQ ID NO: 33515 - DNA, 21 bp, Artificial Sequence
  source: /note="Description of Artificial Sequence: Synthetic oligonucleotide"
ctcttccacagcaacgacgac

SEQ ID NO: 33516 - DNA, 21 bp, Artificial Sequence
  source: /note="Description of Artificial Sequence: Synthetic oligonucleotide"
ctcttcatcaaccacggaagc

SEQ ID NO: 33517 - DNA, 21 bp, Artificial Sequence
  source: /note="Description of Artificial Sequence: Synthetic oligonucleotide"
ctcttcatcacaacaacaagc

SEQ ID NO: 33518 - DNA, 21 bp, Artificial Sequence
  source: /note="Description of Artificial Sequence: Synthetic oligonucleotide"
ctcttcaaacacagcagagaa

SEQ ID NO: 33519 - DNA, 21 bp, Artificial Sequence
  source: /note="Description of Artificial Sequence: Synthetic oligonucleotide"
ctcttcctcagccaagtccca

SEQ ID NO: 33520 - DNA, 21 bp, Artificial Sequence
  source: /note="Description of Artificial Sequence: Synthetic oligonucleotide"
ctcttcaaccaacaagtcctc

SEQ ID NO: 33521 - DNA, 21 bp, Artificial Sequence
  source: /note="Description of Artificial Sequence: Synthetic oligonucleotide"
ctcttcaacagcagcccagaa

SEQ ID NO: 33522 - DNA, 21 bp, Artificial Sequence
  source: /note="Description of Artificial Sequence: Synthetic oligonucleotide"
ctcttcccaggaagcatcgac

SEQ ID NO: 33523 - DNA, 21 bp, Artificial Sequence
  source: /note="Description of Artificial Sequence: Synthetic oligonucleotide"
ctcttcccaacaggaagcctc

SEQ ID NO: 33524 - DNA, 21 bp, Artificial Sequence
  source: /note="Description of Artificial Sequence: Synthetic oligonucleotide"
ctcttcagagcaagcgacaga

SEQ ID NO: 33525 - DNA, 21 bp, Artificial Sequence
  source: /note="Description of Artificial Sequence: Synthetic oligonucleotide"
ctcttcagcgaaagcagaagc

SEQ ID NO: 33526 - DNA, 21 bp, Artificial Sequence
  source: /note="Description of Artificial Sequence: Synthetic oligonucleotide"
ctcttcagcggagcagaaagc

SEQ ID NO: 33527 - DNA, 21 bp, Artificial Sequence
  source: /note="Description of Artificial Sequence: Synthetic oligonucleotide"
ctcttcagcatgccagtcagc

SEQ ID NO: 33528 - DNA, 21 bp, Artificial Sequence
  source: /note="Description of Artificial Sequence: Synthetic oligonucleotide"
ctcttcacaagcgcagacctc

SEQ ID NO: 33529 - DNA, 21 bp, Artificial Sequence
  source: /note="Description of Artificial Sequence: Synthetic oligonucleotide"
ctcttcacaagcgaaagcatc

SEQ ID NO: 33530 - DNA, 21 bp, Artificial Sequence
  source: /note="Description of Artificial Sequence: Synthetic oligonucleotide"
ctcttcacaagcccaagcatg

SEQ ID NO: 33531 - DNA, 21 bp, Artificial Sequence
  source: /note="Description of Artificial Sequence: Synthetic oligonucleotide"
ctcttcacaacaatggtccca

SEQ ID NO: 33532 - DNA, 21 bp, Artificial Sequence
  source: /note="Description of Artificial Sequence: Synthetic oligonucleotide"
ctcggagcagcagtcaacctc

SEQ ID NO: 33533 - DNA, 21 bp, Artificial Sequence
  source: /note="Description of Artificial Sequence: Synthetic oligonucleotide"
ctcggagcaggaagcagcgtc

SEQ ID NO: 33534 - DNA, 21 bp, Artificial Sequence
  source: /note="Description of Artificial Sequence: Synthetic oligonucleotide"
ctcggagcactcagcggacca

SEQ ID NO: 33535 - DNA, 21 bp, Artificial Sequence
  source: /note="Description of Artificial Sequence: Synthetic oligonucleotide"
ctcggagcactcacacacgca

SEQ ID NO: 33536 - DNA, 21 bp, Artificial Sequence
  source: /note="Description of Artificial Sequence: Synthetic oligonucleotide"
ctcggagcaagaatccaactc

SEQ ID NO: 33537 - DNA, 21 bp, Artificial Sequence
  source: /note="Description of Artificial Sequence: Synthetic oligonucleotide"
ctcggagcaagaacagcagca

SEQ ID NO: 33538 - DNA, 21 bp, Artificial Sequence
  source: /note="Description of Artificial Sequence: Synthetic oligonucleotide"
ctcggagcaagcagcagcctc

SEQ ID NO: 33539 - DNA, 21 bp, Artificial Sequence
  source: /note="Description of Artificial Sequence: Synthetic oligonucleotide"
ctcggagcatacctcggacca

SEQ ID NO: 33540 - DNA, 21 bp, Artificial Sequence
  source: /note="Description of Artificial Sequence: Synthetic oligonucleotide"
ctcggagcatacaacgcacaa

SEQ ID NO: 33541 - DNA, 21 bp, Artificial Sequence
  source: /note="Description of Artificial Sequence: Synthetic oligonucleotide"
ctcggagacgcaggattcagc

SEQ ID NO: 33542 - DNA, 21 bp, Artificial Sequence
  source: /note="Description of Artificial Sequence: Synthetic oligonucleotide"
ctcggagaccactacagacac

SEQ ID NO: 33543 - DNA, 21 bp, Artificial Sequence
  source: /note="Description of Artificial Sequence: Synthetic oligonucleotide"
ctcggagacccattcccacca

SEQ ID NO: 33544 - DNA, 21 bp, Artificial Sequence
  source: /note="Description of Artificial Sequence: Synthetic oligonucleotide"
ctcggagacagaacagacttc

SEQ ID NO: 33545 - DNA, 21 bp, Artificial Sequence
  source: /note="Description of Artificial Sequence: Synthetic oligonucleotide"
ctcggagacagaacacacatc

SEQ ID NO: 33546 - DNA, 21 bp, Artificial Sequence
  source: /note="Description of Artificial Sequence: Synthetic oligonucleotide"
ctcggagacacagcacaccac

SEQ ID NO: 33547 - DNA, 21 bp, Artificial Sequence
  source: /note="Description of Artificial Sequence: Synthetic oligonucleotide"
ctcggattcggagcaacacaa

SEQ ID NO: 33548 - DNA, 21 bp, Artificial Sequence
  source: /note="Description of Artificial Sequence: Synthetic oligonucleotide"
ctcggattcaacgtcgtcgtc

SEQ ID NO: 33549 - DNA, 21 bp, Artificial Sequence
  source: /note="Description of Artificial Sequence: Synthetic oligonucleotide"
ctcggattcaactaccaagac

SEQ ID NO: 33550 - DNA, 21 bp, Artificial Sequence
  source: /note="Description of Artificial Sequence: Synthetic oligonucleotide"
ctcggattcccaagcacagaa

SEQ ID NO: 33551 - DNA, 21 bp, Artificial Sequence
  source: /note="Description of Artificial Sequence: Synthetic oligonucleotide"
ctcggaggagacgcacaaatc

SEQ ID NO: 33552 - DNA, 21 bp, Artificial Sequence
  source: /note="Description of Artificial Sequence: Synthetic oligonucleotide"
ctcggaggaggaagaagcctc

SEQ ID NO: 33553 - DNA, 21 bp, Artificial Sequence
  source: /note="Description of Artificial Sequence: Synthetic oligonucleotide"
ctcggaggaagcctcagcatg

SEQ ID NO: 33554 - DNA, 21 bp, Artificial Sequence
  source: /note="Description of Artificial Sequence: Synthetic oligonucleotide"
ctcggaggaagctacccactc

SEQ ID NO: 33555 - DNA, 21 bp, Artificial Sequence
  source: /note="Description of Artificial Sequence: Synthetic oligonucleotide"
ctcggacacgcaacaagcgca

SEQ ID NO: 33556 - DNA, 21 bp, Artificial Sequence
  source: /note="Description of Artificial Sequence: Synthetic oligonucleotide"
ctcggacacggaccaggacac

SEQ ID NO: 33557 - DNA, 21 bp, Artificial Sequence
  source: /note="Description of Artificial Sequence: Synthetic oligonucleotide"
ctcggacacagcaaaccacca

SEQ ID NO: 33558 - DNA, 21 bp, Artificial Sequence
  source: /note="Description of Artificial Sequence: Synthetic oligonucleotide"
ctcggaatcatcacacacgca

SEQ ID NO: 33559 - DNA, 21 bp, Artificial Sequence
  source: /note="Description of Artificial Sequence: Synthetic oligonucleotide"
ctcggaatcatgaaaacagca

SEQ ID NO: 33560 - DNA, 21 bp, Artificial Sequence
  source: /note="Description of Artificial Sequence: Synthetic oligonucleotide"
ctcggaaaactcacaacagtc

SEQ ID NO: 33561 - DNA, 21 bp, Artificial Sequence
  source: /note="Description of Artificial Sequence: Synthetic oligonucleotide"
ctcggaaaaagcctcctcaca

SEQ ID NO: 33562 - DNA, 21 bp, Artificial Sequence
  source: /note="Description of Artificial Sequence: Synthetic oligonucleotide"
ctcggaaaatacggaatcgtc

SEQ ID NO: 33563 - DNA, 21 bp, Artificial Sequence
  source: /note="Description of Artificial Sequence: Synthetic oligonucleotide"
ctcggactcaaccaccaaaca

SEQ ID NO: 33564 - DNA, 21 bp, Artificial Sequence
  source: /note="Description of Artificial Sequence: Synthetic oligonucleotide"
ctcggactcccaagcaaagga

SEQ ID NO: 33565 - DNA, 21 bp, Artificial Sequence
  source: /note="Description of Artificial Sequence: Synthetic oligonucleotide"
ctcggactcagagacaaagac

SEQ ID NO: 33566 - DNA, 21 bp, Artificial Sequence
  source: /note="Description of Artificial Sequence: Synthetic oligonucleotide"
ctcggactcagagaaagcagc

SEQ ID NO: 33567 - DNA, 21 bp, Artificial Sequence
  source: /note="Description of Artificial Sequence: Synthetic oligonucleotide"
ctcggactcagcacagtccac

SEQ ID NO: 33568 - DNA, 21 bp, Artificial Sequence
  source: /note="Description of Artificial Sequence: Synthetic oligonucleotide"
ctcggactcgtcctcaaccaa

SEQ ID NO: 33569 - DNA, 21 bp, Artificial Sequence
  source: /note="Description of Artificial Sequence: Synthetic oligonucleotide"
ctcggaatgctcaaaacagaa

SEQ ID NO: 33570 - DNA, 21 bp, Artificial Sequence
  source: /note="Description of Artificial Sequence: Synthetic oligonucleotide"
ctcggaatgatgccagcaagc

SEQ ID NO: 33571 - DNA, 21 bp, Artificial Sequence
  source: /note="Description of Artificial Sequence: Synthetic oligonucleotide"
ctcggaaaccacccaagcgtc

SEQ ID NO: 33572 - DNA, 21 bp, Artificial Sequence
  source: /note="Description of Artificial Sequence: Synthetic oligonucleotide"
ctcggaaacccagacaaaatg

SEQ ID NO: 33573 - DNA, 21 bp, Artificial Sequence
  source: /note="Description of Artificial Sequence: Synthetic oligonucleotide"
ctcggaaacccaagcccatgc

SEQ ID NO: 33574 - DNA, 21 bp, Artificial Sequence
  source: /note="Description of Artificial Sequence: Synthetic oligonucleotide"
ctcggaaacccagtcacagtc

SEQ ID NO: 33575 - DNA, 21 bp, Artificial Sequence
  source: /note="Description of Artificial Sequence: Synthetic oligonucleotide"
ctcggaaaccaaagaagcgac

SEQ ID NO: 33576 - DNA, 21 bp, Artificial Sequence
  source: /note="Description of Artificial Sequence: Synthetic oligonucleotide"
ctcggaccagcaggaatgcca

SEQ ID NO: 33577 - DNA, 21 bp, Artificial Sequence
  source: /note="Description of Artificial Sequence: Synthetic oligonucleotide"
ctcggaccagcaggaccatac

SEQ ID NO: 33578 - DNA, 21 bp, Artificial Sequence
  source: /note="Description of Artificial Sequence: Synthetic oligonucleotide"
ctcggaccattccacggagaa

SEQ ID NO: 33579 - DNA, 21 bp, Artificial Sequence
  source: /note="Description of Artificial Sequence: Synthetic oligonucleotide"
ctcggaccaggaagctaccca

SEQ ID NO: 33580 - DNA, 21 bp, Artificial Sequence
  source: /note="Description of Artificial Sequence: Synthetic oligonucleotide"
ctcggaccaagcagcaaagtc

SEQ ID NO: 33581 - DNA, 21 bp, Artificial Sequence
  source: /note="Description of Artificial Sequence: Synthetic oligonucleotide"
ctcggaccaagctacacaaac

SEQ ID NO: 33582 - DNA, 21 bp, Artificial Sequence
  source: /note="Description of Artificial Sequence: Synthetic oligonucleotide"
ctcggaccaacaatcagaagc

SEQ ID NO: 33583 - DNA, 21 bp, Artificial Sequence
  source: /note="Description of Artificial Sequence: Synthetic oligonucleotide"
ctcggaccaacaaaactccca

SEQ ID NO: 33584 - DNA, 21 bp, Artificial Sequence
  source: /note="Description of Artificial Sequence: Synthetic oligonucleotide"
ctcggacaagcactcagagtc

SEQ ID NO: 33585 - DNA, 21 bp, Artificial Sequence
  source: /note="Description of Artificial Sequence: Synthetic oligonucleotide"
ctcggacaaaaaccaaacgaa

SEQ ID NO: 33586 - DNA, 21 bp, Artificial Sequence
  source: /note="Description of Artificial Sequence: Synthetic oligonucleotide"
ctcggacaaagcggatgcaga

SEQ ID NO: 33587 - DNA, 21 bp, Artificial Sequence
  source: /note="Description of Artificial Sequence: Synthetic oligonucleotide"
ctcggacaaagcggaacaaaa

SEQ ID NO: 33588 - DNA, 21 bp, Artificial Sequence
  source: /note="Description of Artificial Sequence: Synthetic oligonucleotide"
ctcggaagagcactcgaacac

SEQ ID NO: 33589 - DNA, 21 bp, Artificial Sequence
  source: /note="Description of Artificial Sequence: Synthetic oligonucleotide"
ctcggaagagcatacagccaa

SEQ ID NO: 33590 - DNA, 21 bp, Artificial Sequence
  source: /note="Description of Artificial Sequence: Synthetic oligonucleotide"
ctcggaagagaaagaccaaca

SEQ ID NO: 33591 - DNA, 21 bp, Artificial Sequence
  source: /note="Description of Artificial Sequence: Synthetic oligonucleotide"
ctcggaagaatcgcagtcaac

SEQ ID NO: 33592 - DNA, 21 bp, Artificial Sequence
  source: /note="Description of Artificial Sequence: Synthetic oligonucleotide"
ctcggaagactcaacagcgga

SEQ ID NO: 33593 - DNA, 21 bp, Artificial Sequence
  source: /note="Description of Artificial Sequence: Synthetic oligonucleotide"
ctcggaagaccacaaatggac

SEQ ID NO: 33594 - DNA, 21 bp, Artificial Sequence
  source: /note="Description of Artificial Sequence: Synthetic oligonucleotide"
ctcggaagaagcggagcactc

SEQ ID NO: 33595 - DNA, 21 bp, Artificial Sequence
  source: /note="Description of Artificial Sequence: Synthetic oligonucleotide"
ctcggaagcgcaggaccacca

SEQ ID NO: 33596 - DNA, 21 bp, Artificial Sequence
  source: /note="Description of Artificial Sequence: Synthetic oligonucleotide"
ctcggaagcgcaggatacagc

SEQ ID NO: 33597 - DNA, 21 bp, Artificial Sequence
  source: /note="Description of Artificial Sequence: Synthetic oligonucleotide"
ctcggaagcgcacacagccca

SEQ ID NO: 33598 - DNA, 21 bp, Artificial Sequence
  source: /note="Description of Artificial Sequence: Synthetic oligonucleotide"
ctcggaagcgcaacaagcgga

SEQ ID NO: 33599 - DNA, 21 bp, Artificial Sequence
  source: /note="Description of Artificial Sequence: Synthetic oligonucleotide"
ctcggaagccactacagcaac

SEQ ID NO: 33600 - DNA, 21 bp, Artificial Sequence
  source: /note="Description of Artificial Sequence: Synthetic oligonucleotide"
ctcggaagcctcacagtcgca

SEQ ID NO: 33601 - DNA, 21 bp, Artificial Sequence
  source: /note="Description of Artificial Sequence: Synthetic oligonucleotide"
ctcggaagcatgccactcctc

SEQ ID NO: 33602 - DNA, 21 bp, Artificial Sequence
  source: /note="Description of Artificial Sequence: Synthetic oligonucleotide"
ctcggaagcaaccacaaacca

SEQ ID NO: 33603 - DNA, 21 bp, Artificial Sequence
  source: /note="Description of Artificial Sequence: Synthetic oligonucleotide"
ctcggaagcccaagcccagac

SEQ ID NO: 33604 - DNA, 21 bp, Artificial Sequence
  source: /note="Description of Artificial Sequence: Synthetic oligonucleotide"
ctcggaagccaagtcatcgca

SEQ ID NO: 33605 - DNA, 21 bp, Artificial Sequence
  source: /note="Description of Artificial Sequence: Synthetic oligonucleotide"
ctcggaagccaatacgcagtc

SEQ ID NO: 33606 - DNA, 21 bp, Artificial Sequence
  source: /note="Description of Artificial Sequence: Synthetic oligonucleotide"
ctcggaagcagaagcgacctc

SEQ ID NO: 33607 - DNA, 21 bp, Artificial Sequence
  source: /note="Description of Artificial Sequence: Synthetic oligonucleotide"
ctcggaagcagcctcagagca

SEQ ID NO: 33608 - DNA, 21 bp, Artificial Sequence
  source: /note="Description of Artificial Sequence: Synthetic oligonucleotide"
ctcggaagcagcctcagaaac

SEQ ID NO: 33609 - DNA, 21 bp, Artificial Sequence
  source: /note="Description of Artificial Sequence: Synthetic oligonucleotide"
ctcggaagcagccaaagcaga

SEQ ID NO: 33610 - DNA, 21 bp, Artificial Sequence
  source: /note="Description of Artificial Sequence: Synthetic oligonucleotide"
ctcggaagcacaagcgcagtc

SEQ ID NO: 33611 - DNA, 21 bp, Artificial Sequence
  source: /note="Description of Artificial Sequence: Synthetic oligonucleotide"
ctcggaagcgtcaaattcagc

SEQ ID NO: 33612 - DNA, 21 bp, Artificial Sequence
  source: /note="Description of Artificial Sequence: Synthetic oligonucleotide"
ctcggaacagcactccacctc

SEQ ID NO: 33613 - DNA, 21 bp, Artificial Sequence
  source: /note="Description of Artificial Sequence: Synthetic oligonucleotide"
ctcggaacaggaagactctac

SEQ ID NO: 33614 - DNA, 21 bp, Artificial Sequence
  source: /note="Description of Artificial Sequence: Synthetic oligonucleotide"
ctcggaacactcaacacagtc

SEQ ID NO: 33615 - DNA, 21 bp, Artificial Sequence
  source: /note="Description of Artificial Sequence: Synthetic oligonucleotide"
ctcggaacaagagcaagcgga

SEQ ID NO: 33616 - DNA, 21 bp, Artificial Sequence
  source: /note="Description of Artificial Sequence: Synthetic oligonucleotide"
ctcggaacaagaccaatgctc

SEQ ID NO: 33617 - DNA, 21 bp, Artificial Sequence
  source: /note="Description of Artificial Sequence: Synthetic oligonucleotide"
ctcggaacaagcgacgtcctc

SEQ ID NO: 33618 - DNA, 21 bp, Artificial Sequence
  source: /note="Description of Artificial Sequence: Synthetic oligonucleotide"
ctcggaacaagccacgtcgca

SEQ ID NO: 33619 - DNA, 21 bp, Artificial Sequence
  source: /note="Description of Artificial Sequence: Synthetic oligonucleotide"
ctcggaacaagccaaacagga

SEQ ID NO: 33620 - DNA, 21 bp, Artificial Sequence
  source: /note="Description of Artificial Sequence: Synthetic oligonucleotide"
ctcggaacagtcagagtctac

SEQ ID NO: 33621 - DNA, 21 bp, Artificial Sequence
  source: /note="Description of Artificial Sequence: Synthetic oligonucleotide"
ctcggagtcgcaaaaccagca

SEQ ID NO: 33622 - DNA, 21 bp, Artificial Sequence
  source: /note="Description of Artificial Sequence: Synthetic oligonucleotide"
ctcggagtcgacaaaaacgca

SEQ ID NO: 33623 - DNA, 21 bp, Artificial Sequence
  source: /note="Description of Artificial Sequence: Synthetic oligonucleotide"
ctcggagtcgaagtcctcaaa

SEQ ID NO: 33624 - DNA, 21 bp, Artificial Sequence
  source: /note="Description of Artificial Sequence: Synthetic oligonucleotide"
ctcggagtcaaagcagcagga

SEQ ID NO: 33625 - DNA, 21 bp, Artificial Sequence
  source: /note="Description of Artificial Sequence: Synthetic oligonucleotide"
ctcggagtcaaaagcgtcgac

SEQ ID NO: 33626 - DNA, 21 bp, Artificial Sequence
  source: /note="Description of Artificial Sequence: Synthetic oligonucleotide"
ctcggagtcctcagaagcagc

SEQ ID NO: 33627 - DNA, 21 bp, Artificial Sequence
  source: /note="Description of Artificial Sequence: Synthetic oligonucleotide"
ctcggagtcaacacaagccaa

SEQ ID NO: 33628 - DNA, 21 bp, Artificial Sequence
  source: /note="Description of Artificial Sequence: Synthetic oligonucleotide"
ctcggagtcccaccacaaagc

SEQ ID NO: 33629 - DNA, 21 bp, Artificial Sequence
  source: /note="Description of Artificial Sequence: Synthetic oligonucleotide"
ctcggagtcagcagagaactc

SEQ ID NO: 33630 - DNA, 21 bp, Artificial Sequence
  source: /note="Description of Artificial Sequence: Synthetic oligonucleotide"
ctcggagtcagcacacacatg

SEQ ID NO: 33631 - DNA, 21 bp, Artificial Sequence
  source: /note="Description of Artificial Sequence: Synthetic oligonucleotide"
ctcggatacaacctcggagaa

SEQ ID NO: 33632 - DNA, 21 bp, Artificial Sequence
  source: /note="Description of Artificial Sequence: Synthetic oligonucleotide"
ctcggatacccaccaagagaa

SEQ ID NO: 33633 - DNA, 21 bp, Artificial Sequence
  source: /note="Description of Artificial Sequence: Synthetic oligonucleotide"
ctcggatacagcacaggagca

SEQ ID NO: 33634 - DNA, 21 bp, Artificial Sequence
  source: /note="Description of Artificial Sequence: Synthetic oligonucleotide"
ctccacgcagcaccagcaagc

SEQ ID NO: 33635 - DNA, 21 bp, Artificial Sequence
  source: /note="Description of Artificial Sequence: Synthetic oligonucleotide"
ctccacgcaaacagaacagaa

SEQ ID NO: 33636 - DNA, 21 bp, Artificial Sequence
  source: /note="Description of Artificial Sequence: Synthetic oligonucleotide"
ctccacgcaccagaagtcgca

SEQ ID NO: 33637 - DNA, 21 bp, Artificial Sequence
  source: /note="Description of Artificial Sequence: Synthetic oligonucleotide"
ctccacgcaacaagcagcaca

SEQ ID NO: 33638 - DNA, 21 bp, Artificial Sequence
  source: /note="Description of Artificial Sequence: Synthetic oligonucleotide"
ctccacgcaacaacaggacca

SEQ ID NO: 33639 - DNA, 21 bp, Artificial Sequence
  source: /note="Description of Artificial Sequence: Synthetic oligonucleotide"
ctccacgaatacagaagccca

SEQ ID NO: 33640 - DNA, 21 bp, Artificial Sequence
  source: /note="Description of Artificial Sequence: Synthetic oligonucleotide"
ctccacttcggaccagaagga

SEQ ID NO: 33641 - DNA, 21 bp, Artificial Sequence
  source: /note="Description of Artificial Sequence: Synthetic oligonucleotide"
ctccacggactcggaagcgga

SEQ ID NO: 33642 - DNA, 21 bp, Artificial Sequence
  source: /note="Description of Artificial Sequence: Synthetic oligonucleotide"
ctccacggaatgccagaaaga

SEQ ID NO: 33643 - DNA, 21 bp, Artificial Sequence
  source: /note="Description of Artificial Sequence: Synthetic oligonucleotide"
ctccacatcagagaaatggca

SEQ ID NO: 33644 - DNA, 21 bp, Artificial Sequence
  source: /note="Description of Artificial Sequence: Synthetic oligonucleotide"
ctccacaaaagcggattcaac

SEQ ID NO: 33645 - DNA, 21 bp, Artificial Sequence
  source: /note="Description of Artificial Sequence: Synthetic oligonucleotide"
ctccacctccaaggaaacagc

SEQ ID NO: 33646 - DNA, 21 bp, Artificial Sequence
  source: /note="Description of Artificial Sequence: Synthetic oligonucleotide"
ctccacctcagcagaccactc

SEQ ID NO: 33647 - DNA, 21 bp, Artificial Sequence
  source: /note="Description of Artificial Sequence: Synthetic oligonucleotide"
ctccacctcagcacagcacca

SEQ ID NO: 33648 - DNA, 21 bp, Artificial Sequence
  source: /note="Description of Artificial Sequence: Synthetic oligonucleotide"
ctccacatgacaacaacaaga

SEQ ID NO: 33649 - DNA, 21 bp, Artificial Sequence
  source: /note="Description of Artificial Sequence: Synthetic oligonucleotide"
ctccacaacgacctcatcaga

SEQ ID NO: 33650 - DNA, 21 bp, Artificial Sequence
  source: /note="Description of Artificial Sequence: Synthetic oligonucleotide"
ctccacaacatcagacaacaa

SEQ ID NO: 33651 - DNA, 21 bp, Artificial Sequence
  source: /note="Description of Artificial Sequence: Synthetic oligonucleotide"
ctccacaacaaaatgtacgac

SEQ ID NO: 33652 - DNA, 21 bp, Artificial Sequence
  source: /note="Description of Artificial Sequence: Synthetic oligonucleotide"
ctccacaaccaagcagcaaga

SEQ ID NO: 33653 - DNA, 21 bp, Artificial Sequence
  source: /note="Description of Artificial Sequence: Synthetic oligonucleotide"
ctccacaacacagcagcagca

SEQ ID NO: 33654 - DNA, 21 bp, Artificial Sequence
  source: /note="Description of Artificial Sequence: Synthetic oligonucleotide"
ctccacaacacaagaaacatg

SEQ ID NO: 33655 - DNA, 21 bp, Artificial Sequence
  source: /note="Description of Artificial Sequence: Synthetic oligonucleotide"
ctccacaacacaagaacagtc

SEQ ID NO: 33656 - DNA, 21 bp, Artificial Sequence
  source: /note="Description of Artificial Sequence: Synthetic oligonucleotide"
ctccacccaggaagcacagca

SEQ ID NO: 33657 - DNA, 21 bp, Artificial Sequence
  source: /note="Description of Artificial Sequence: Synthetic oligonucleotide"
ctccacccactcagcccaaga

SEQ ID NO: 33658 - DNA, 21 bp, Artificial Sequence
  source: /note="Description of Artificial Sequence: Synthetic oligonucleotide"
ctccacccagtccacgcacca

SEQ ID NO: 33659 - DNA, 21 bp, Artificial Sequence
  source: /note="Description of Artificial Sequence: Synthetic oligonucleotide"
ctccaccaagacagactcgca

SEQ ID NO: 33660 - DNA, 21 bp, Artificial Sequence
  source: /note="Description of Artificial Sequence: Synthetic oligonucleotide"
ctccaccaaatgggaaacagc

SEQ ID NO: 33661 - DNA, 21 bp, Artificial Sequence
  source: /note="Description of Artificial Sequence: Synthetic oligonucleotide"
ctccaccaaagctacaaccaa

SEQ ID NO: 33662 - DNA, 21 bp, Artificial Sequence
  source: /note="Description of Artificial Sequence: Synthetic oligonucleotide"
ctccacagagacctcccagtc

SEQ ID NO: 33663 - DNA, 21 bp, Artificial Sequence
  source: /note="Description of Artificial Sequence: Synthetic oligonucleotide"
ctccacagaagaccaagcgaa

SEQ ID NO: 33664 - DNA, 21 bp, Artificial Sequence
  source: /note="Description of Artificial Sequence: Synthetic oligonucleotide"
ctccacagcgcactcacaaga

SEQ ID NO: 33665 - DNA, 21 bp, Artificial Sequence
  source: /note="Description of Artificial Sequence: Synthetic oligonucleotide"
ctccacagcgcaagcccacaa

SEQ ID NO: 33666 - DNA, 21 bp, Artificial Sequence
  source: /note="Description of Artificial Sequence: Synthetic oligonucleotide"
ctccacagcgacacaagagga

SEQ ID NO: 33667 - DNA, 21 bp, Artificial Sequence
  source: /note="Description of Artificial Sequence: Synthetic oligonucleotide"
ctccacagcgaactcacaagc

SEQ ID NO: 33668 - DNA, 21 bp, Artificial Sequence
  source: /note="Description of Artificial Sequence: Synthetic oligonucleotide"
ctccacagcggagaaagacaa

SEQ ID NO: 33669 - DNA, 21 bp, Artificial Sequence
  source: /note="Description of Artificial Sequence: Synthetic oligonucleotide"
ctccacagcaacgtcacaaaa

SEQ ID NO: 33670 - DNA, 21 bp, Artificial Sequence
  source: /note="Description of Artificial Sequence: Synthetic oligonucleotide"
ctccacagcagagcagacagc

SEQ ID NO: 33671 - DNA, 21 bp, Artificial Sequence
  source: /note="Description of Artificial Sequence: Synthetic oligonucleotide"
ctccacagcagagcaatcagc

SEQ ID NO: 33672 - DNA, 21 bp, Artificial Sequence
  source: /note="Description of Artificial Sequence: Synthetic oligonucleotide"
ctccacagcagaggaacagca

SEQ ID NO: 33673 - DNA, 21 bp, Artificial Sequence
  source: /note="Description of Artificial Sequence: Synthetic oligonucleotide"
ctccacagcagcccacaagac

SEQ ID NO: 33674 - DNA, 21 bp, Artificial Sequence
  source: /note="Description of Artificial Sequence: Synthetic oligonucleotide"
ctccacacagcaaaagcagga

SEQ ID NO: 33675 - DNA, 21 bp, Artificial Sequence
  source: /note="Description of Artificial Sequence: Synthetic oligonucleotide"
ctccacacagactggctcaga

SEQ ID NO: 33676 - DNA, 21 bp, Artificial Sequence
  source: /note="Description of Artificial Sequence: Synthetic oligonucleotide"
ctccacacaccacaactcagc

SEQ ID NO: 33677 - DNA, 21 bp, Artificial Sequence
  source: /note="Description of Artificial Sequence: Synthetic oligonucleotide"
ctccacacaagcgcaagacca

SEQ ID NO: 33678 - DNA, 21 bp, Artificial Sequence
  source: /note="Description of Artificial Sequence: Synthetic oligonucleotide"
ctccacgtcccacaaccacca

SEQ ID NO: 33679 - DNA, 21 bp, Artificial Sequence
  source: /note="Description of Artificial Sequence: Synthetic oligonucleotide"
ctcatcgcaagccacagactc

SEQ ID NO: 33680 - DNA, 21 bp, Artificial Sequence
  source: /note="Description of Artificial Sequence: Synthetic oligonucleotide"
ctcatcgcaagcagcggagtc

SEQ ID NO: 33681 - DNA, 21 bp, Artificial Sequence
  source: /note="Description of Artificial Sequence: Synthetic oligonucleotide"
ctcatcgcaagcacaacaagc

SEQ ID NO: 33682 - DNA, 21 bp, Artificial Sequence
  source: /note="Description of Artificial Sequence: Synthetic oligonucleotide"
ctcatcggaaacgtcgtcatg

SEQ ID NO: 33683 - DNA, 21 bp, Artificial Sequence
  source: /note="Description of Artificial Sequence: Synthetic oligonucleotide"
ctcatcggaagaccaatggaa

SEQ ID NO: 33684 - DNA, 21 bp, Artificial Sequence
  source: /note="Description of Artificial Sequence: Synthetic oligonucleotide"
ctcatcggaagaacaatcagc

SEQ ID NO: 33685 - DNA, 21 bp, Artificial Sequence
  source: /note="Description of Artificial Sequence: Synthetic oligonucleotide"
ctcatcggaacagcaagcctc

SEQ ID NO: 33686 - DNA, 21 bp, Artificial Sequence
  source: /note="Description of Artificial Sequence: Synthetic oligonucleotide"
ctcatcggaacaccagtcgtc

SEQ ID NO: 33687 - DNA, 21 bp, Artificial Sequence
  source: /note="Description of Artificial Sequence: Synthetic oligonucleotide"
ctcatccacgcaagcggagga

SEQ ID NO: 33688 - DNA, 21 bp, Artificial Sequence
  source: /note="Description of Artificial Sequence: Synthetic oligonucleotide"
ctcatccacctcagcggagca

SEQ ID NO: 33689 - DNA, 21 bp, Artificial Sequence
  source: /note="Description of Artificial Sequence: Synthetic oligonucleotide"
ctcatcaaagaaaacgtcctc

SEQ ID NO: 33690 - DNA, 21 bp, Artificial Sequence
  source: /note="Description of Artificial Sequence: Synthetic oligonucleotide"
ctcatcaaaggagcagcaagc

SEQ ID NO: 33691 - DNA, 21 bp, Artificial Sequence
  source: /note="Description of Artificial Sequence: Synthetic oligonucleotide"
ctcatcaaaggaagcctcgac

SEQ ID NO: 33692 - DNA, 21 bp, Artificial Sequence
  source: /note="Description of Artificial Sequence: Synthetic oligonucleotide"
ctcatcaaaccaagcgtccca

SEQ ID NO: 33693 - DNA, 21 bp, Artificial Sequence
  source: /note="Description of Artificial Sequence: Synthetic oligonucleotide"
ctcatcaaaagcagcgaacca

SEQ ID NO: 33694 - DNA, 21 bp, Artificial Sequence
  source: /note="Description of Artificial Sequence: Synthetic oligonucleotide"
ctcatcaaaagcacactcgtc

SEQ ID NO: 33695 - DNA, 21 bp, Artificial Sequence
  source: /note="Description of Artificial Sequence: Synthetic oligonucleotide"
ctcatcaaaacaacacacgga

SEQ ID NO: 33696 - DNA, 21 bp, Artificial Sequence
  source: /note="Description of Artificial Sequence: Synthetic oligonucleotide"
ctcatcctcccaaaccacagc

SEQ ID NO: 33697 - DNA, 21 bp, Artificial Sequence
  source: /note="Description of Artificial Sequence: Synthetic oligonucleotide"
ctcatcatgagacacgactgc

SEQ ID NO: 33698 - DNA, 21 bp, Artificial Sequence
  source: /note="Description of Artificial Sequence: Synthetic oligonucleotide"
ctcatcaacgaaaacccacac

SEQ ID NO: 33699 - DNA, 21 bp, Artificial Sequence
  source: /note="Description of Artificial Sequence: Synthetic oligonucleotide"
ctcatcaacaaaatcagccca

SEQ ID NO: 33700 - DNA, 21 bp, Artificial Sequence
  source: /note="Description of Artificial Sequence: Synthetic oligonucleotide"
ctcatcaacccagaaatgtac

SEQ ID NO: 33701 - DNA, 21 bp, Artificial Sequence
  source: /note="Description of Artificial Sequence: Synthetic oligonucleotide"
ctcatcccaccacaccacgac

SEQ ID NO: 33702 - DNA, 21 bp, Artificial Sequence
  source: /note="Description of Artificial Sequence: Synthetic oligonucleotide"
ctcatcccaacagtcatgaac

SEQ ID NO: 33703 - DNA, 21 bp, Artificial Sequence
  source: /note="Description of Artificial Sequence: Synthetic oligonucleotide"
ctcatccaagaagtcctccaa

SEQ ID NO: 33704 - DNA, 21 bp, Artificial Sequence
  source: /note="Description of Artificial Sequence: Synthetic oligonucleotide"
ctcatccaaatcagccaacaa

SEQ ID NO: 33705 - DNA, 21 bp, Artificial Sequence
  source: /note="Description of Artificial Sequence: Synthetic oligonucleotide"
ctcatccaaaaccaaggaaca

SEQ ID NO: 33706 - DNA, 21 bp, Artificial Sequence
  source: /note="Description of Artificial Sequence: Synthetic oligonucleotide"
ctcatcagagaacaaaaccca

SEQ ID NO: 33707 - DNA, 21 bp, Artificial Sequence
  source: /note="Description of Artificial Sequence: Synthetic oligonucleotide"
ctcatcagactcagcgacaac

SEQ ID NO: 33708 - DNA, 21 bp, Artificial Sequence
  source: /note="Description of Artificial Sequence: Synthetic oligonucleotide"
ctcatcagaagcgacacaatc

SEQ ID NO: 33709 - DNA, 21 bp, Artificial Sequence
  source: /note="Description of Artificial Sequence: Synthetic oligonucleotide"
ctcatcagaagcatcccacca

SEQ ID NO: 33710 - DNA, 21 bp, Artificial Sequence
  source: /note="Description of Artificial Sequence: Synthetic oligonucleotide"
ctcatcagcgcaagccacatc

SEQ ID NO: 33711 - DNA, 21 bp, Artificial Sequence
  source: /note="Description of Artificial Sequence: Synthetic oligonucleotide"
ctcatcagcgacgcaagcagc

SEQ ID NO: 33712 - DNA, 21 bp, Artificial Sequence
  source: /note="Description of Artificial Sequence: Synthetic oligonucleotide"
ctcatcagcccaacagtcaca

SEQ ID NO: 33713 - DNA, 21 bp, Artificial Sequence
  source: /note="Description of Artificial Sequence: Synthetic oligonucleotide"
ctcatcagcagagaagtcaca

SEQ ID NO: 33714 - DNA, 21 bp, Artificial Sequence
  source: /note="Description of Artificial Sequence: Synthetic oligonucleotide"
ctcatcagcagagtcccagac

SEQ ID NO: 33715 - DNA, 21 bp, Artificial Sequence
  source: /note="Description of Artificial Sequence: Synthetic oligonucleotide"
ctcatcacagcagcactcgca

SEQ ID NO: 33716 - DNA, 21 bp, Artificial Sequence
  source: /note="Description of Artificial Sequence: Synthetic oligonucleotide"
ctcatcacaggacacagcaca

SEQ ID NO: 33717 - DNA, 21 bp, Artificial Sequence
  source: /note="Description of Artificial Sequence: Synthetic oligonucleotide"
ctcatcacaccaggagcaagc

SEQ ID NO: 33718 - DNA, 21 bp, Artificial Sequence
  source: /note="Description of Artificial Sequence: Synthetic oligonucleotide"
ctcatcacaccactcccaagc

SEQ ID NO: 33719 - DNA, 21 bp, Artificial Sequence
  source: /note="Description of Artificial Sequence: Synthetic oligonucleotide"
ctcatcacaagcgcagcagga

SEQ ID NO: 33720 - DNA, 21 bp, Artificial Sequence
  source: /note="Description of Artificial Sequence: Synthetic oligonucleotide"
ctcatcgtcgcactcaaagga

SEQ ID NO: 33721 - DNA, 21 bp, Artificial Sequence
  source: /note="Description of Artificial Sequence: Synthetic oligonucleotide"
ctcatcgtcgaacaagcaaga

SEQ ID NO: 33722 - DNA, 21 bp, Artificial Sequence
  source: /note="Description of Artificial Sequence: Synthetic oligonucleotide"
ctcatcgtcacagaaaacaaa

SEQ ID NO: 33723 - DNA, 21 bp, Artificial Sequence
  source: /note="Description of Artificial Sequence: Synthetic oligonucleotide"
ctcaaagcaggaagcagcagc

SEQ ID NO: 33724 - DNA, 21 bp, Artificial Sequence
  source: /note="Description of Artificial Sequence: Synthetic oligonucleotide"
ctcaaagcaggaacatacgga

SEQ ID NO: 33725 - DNA, 21 bp, Artificial Sequence
  source: /note="Description of Artificial Sequence: Synthetic oligonucleotide"
ctcaaagcaatcccatacgga

SEQ ID NO: 33726 - DNA, 21 bp, Artificial Sequence
  source: /note="Description of Artificial Sequence: Synthetic oligonucleotide"
ctcaaagcacaagtcgaactc

SEQ ID NO: 33727 - DNA, 21 bp, Artificial Sequence
  source: /note="Description of Artificial Sequence: Synthetic oligonucleotide"
ctcaaagcaacaatcacaagc

SEQ ID NO: 33728 - DNA, 21 bp, Artificial Sequence
  source: /note="Description of Artificial Sequence: Synthetic oligonucleotide"
ctcaaagacggaagagcaagc

SEQ ID NO: 33729 - DNA, 21 bp, Artificial Sequence
  source: /note="Description of Artificial Sequence: Synthetic oligonucleotide"
ctcaaagacatgagactcaca

SEQ ID NO: 33730 - DNA, 21 bp, Artificial Sequence
  source: /note="Description of Artificial Sequence: Synthetic oligonucleotide"
ctcaaagacccagcaagactc

SEQ ID NO: 33731 - DNA, 21 bp, Artificial Sequence
  source: /note="Description of Artificial Sequence: Synthetic oligonucleotide"
ctcaaagacccaacagcatgg

SEQ ID NO: 33732 - DNA, 21 bp, Artificial Sequence
  source: /note="Description of Artificial Sequence: Synthetic oligonucleotide"
ctcaaagacagcctcacatgc

SEQ ID NO: 33733 - DNA, 21 bp, Artificial Sequence
  source: /note="Description of Artificial Sequence: Synthetic oligonucleotide"
ctcaaagactacggaggagca

SEQ ID NO: 33734 - DNA, 21 bp, Artificial Sequence
  source: /note="Description of Artificial Sequence: Synthetic oligonucleotide"
ctcaaagaaatcgcaggactc

SEQ ID NO: 33735 - DNA, 21 bp, Artificial Sequence
  source: /note="Description of Artificial Sequence: Synthetic oligonucleotide"
ctcaaattcagcgaaagcaaa

SEQ ID NO: 33736 - DNA, 21 bp, Artificial Sequence
  source: /note="Description of Artificial Sequence: Synthetic oligonucleotide"
ctcaaaggagcagtcgtcgtc

SEQ ID NO: 33737 - DNA, 21 bp, Artificial Sequence
  source: /note="Description of Artificial Sequence: Synthetic oligonucleotide"
ctcaaaggagacgcaggatac

SEQ ID NO: 33738 - DNA, 21 bp, Artificial Sequence
  source: /note="Description of Artificial Sequence: Synthetic oligonucleotide"
ctcaaaggaggagcagacaca

SEQ ID NO: 33739 - DNA, 21 bp, Artificial Sequence
  source: /note="Description of Artificial Sequence: Synthetic oligonucleotide"
ctcaaaggaatgacaggactc

SEQ ID NO: 33740 - DNA, 21 bp, Artificial Sequence
  source: /note="Description of Artificial Sequence: Synthetic oligonucleotide"
ctcaaaggaccaaacgcagtc

SEQ ID NO: 33741 - DNA, 21 bp, Artificial Sequence
  source: /note="Description of Artificial Sequence: Synthetic oligonucleotide"
ctcaaaggatacatcgacagc

SEQ ID NO: 33742 - DNA, 21 bp, Artificial Sequence
  source: /note="Description of Artificial Sequence: Synthetic oligonucleotide"
ctcaaacaccaactcctcgca

SEQ ID NO: 33743 - DNA, 21 bp, Artificial Sequence
  source: /note="Description of Artificial Sequence: Synthetic oligonucleotide"
ctcaaacacagcctcccagac

SEQ ID NO: 33744 - DNA, 21 bp, Artificial Sequence
  source: /note="Description of Artificial Sequence: Synthetic oligonucleotide"
ctcaaaatcggaacagtcaca

SEQ ID NO: 33745 - DNA, 21 bp, Artificial Sequence
  source: /note="Description of Artificial Sequence: Synthetic oligonucleotide"
ctcaaactcgcaccaaacgtc

SEQ ID NO: 33746 - DNA, 21 bp, Artificial Sequence
  source: /note="Description of Artificial Sequence: Synthetic oligonucleotide"
ctcaaactcgacgaaggactc

SEQ ID NO: 33747 - DNA, 21 bp, Artificial Sequence
  source: /note="Description of Artificial Sequence: Synthetic oligonucleotide"
ctcaaactcagagcaagcgaa

SEQ ID NO: 33748 - DNA, 21 bp, Artificial Sequence
  source: /note="Description of Artificial Sequence: Synthetic oligonucleotide"
ctcaaaatgagcagcacacca

SEQ ID NO: 33749 - DNA, 21 bp, Artificial Sequence
  source: /note="Description of Artificial Sequence: Synthetic oligonucleotide"
ctcaaaatggtcgacaacgtc

SEQ ID NO: 33750 - DNA, 21 bp, Artificial Sequence
  source: /note="Description of Artificial Sequence: Synthetic oligonucleotide"
ctcaaaaacggaagcatggtc

SEQ ID NO: 33751 - DNA, 21 bp, Artificial Sequence
  source: /note="Description of Artificial Sequence: Synthetic oligonucleotide"
ctcaaaaacccactcccaagc

SEQ ID NO: 33752 - DNA, 21 bp, Artificial Sequence
  source: /note="Description of Artificial Sequence: Synthetic oligonucleotide"
ctcaaaaacccaagcaacgtc

SEQ ID NO: 33753 - DNA, 21 bp, Artificial Sequence
  source: /note="Description of Artificial Sequence: Synthetic oligonucleotide"
ctcaaaccagacatgacaaga

SEQ ID NO: 33754 - DNA, 21 bp, Artificial Sequence
  source: /note="Description of Artificial Sequence: Synthetic oligonucleotide"
ctcaaaccagacagaccagac

SEQ ID NO: 33755 - DNA, 21 bp, Artificial Sequence
  source: /note="Description of Artificial Sequence: Synthetic oligonucleotide"
ctcaaaccaaacgaaatcagc

SEQ ID NO: 33756 - DNA, 21 bp, Artificial Sequence
  source: /note="Description of Artificial Sequence: Synthetic oligonucleotide"
ctcaaaccaagcccaatccca

SEQ ID NO: 33757 - DNA, 21 bp, Artificial Sequence
  source: /note="Description of Artificial Sequence: Synthetic oligonucleotide"
ctcaaaccaagcagctacgtc

SEQ ID NO: 33758 - DNA, 21 bp, Artificial Sequence
  source: /note="Description of Artificial Sequence: Synthetic oligonucleotide"
ctcaaaccagtcccaagcctc

SEQ ID NO: 33759 - DNA, 21 bp, Artificial Sequence
  source: /note="Description of Artificial Sequence: Synthetic oligonucleotide"
ctcaaacaaatcgacctcgga

SEQ ID NO: 33760 - DNA, 21 bp, Artificial Sequence
  source: /note="Description of Artificial Sequence: Synthetic oligonucleotide"
ctcaaacaaccaacacaatgc

SEQ ID NO: 33761 - DNA, 21 bp, Artificial Sequence
  source: /note="Description of Artificial Sequence: Synthetic oligonucleotide"
ctcaaaagagaattcgactac

SEQ ID NO: 33762 - DNA, 21 bp, Artificial Sequence
  source: /note="Description of Artificial Sequence: Synthetic oligonucleotide"
ctcaaaagcgcaacaacaatc

SEQ ID NO: 33763 - DNA, 21 bp, Artificial Sequence
  source: /note="Description of Artificial Sequence: Synthetic oligonucleotide"
ctcaaaagcggagtcagccca

SEQ ID NO: 33764 - DNA, 21 bp, Artificial Sequence
  source: /note="Description of Artificial Sequence: Synthetic oligonucleotide"
ctcaaaagcccaagcacacca

SEQ ID NO: 33765 - DNA, 21 bp, Artificial Sequence
  source: /note="Description of Artificial Sequence: Synthetic oligonucleotide"
ctcaaaagccaactcagcgac

SEQ ID NO: 33766 - DNA, 21 bp, Artificial Sequence
  source: /note="Description of Artificial Sequence: Synthetic oligonucleotide"
ctcaaaagccaaagcttcaca

SEQ ID NO: 33767 - DNA, 21 bp, Artificial Sequence
  source: /note="Description of Artificial Sequence: Synthetic oligonucleotide"
ctcaaaagcacactcatgcca

SEQ ID NO: 33768 - DNA, 21 bp, Artificial Sequence
  source: /note="Description of Artificial Sequence: Synthetic oligonucleotide"
ctcaaaagcacaccaccagga

SEQ ID NO: 33769 - DNA, 21 bp, Artificial Sequence
  source: /note="Description of Artificial Sequence: Synthetic oligonucleotide"
ctcaaaagcacaagccaagtc

SEQ ID NO: 33770 - DNA, 21 bp, Artificial Sequence
  source: /note="Description of Artificial Sequence: Synthetic oligonucleotide"
ctcaaaacaggaagagacagc

SEQ ID NO: 33771 - DNA, 21 bp, Artificial Sequence
  source: /note="Description of Artificial Sequence: Synthetic oligonucleotide"
ctcaaaacaggatacatgcca

SEQ ID NO: 33772 - DNA, 21 bp, Artificial Sequence
  source: /note="Description of Artificial Sequence: Synthetic oligonucleotide"
ctcaaaacactcctcaaaaca

SEQ ID NO: 33773 - DNA, 21 bp, Artificial Sequence
  source: /note="Description of Artificial Sequence: Synthetic oligonucleotide"
ctcaaaacaaacgaaagagtc

SEQ ID NO: 33774 - DNA, 21 bp, Artificial Sequence
  source: /note="Description of Artificial Sequence: Synthetic oligonucleotide"
ctcaaaacaagcggagtcatc

SEQ ID NO: 33775 - DNA, 21 bp, Artificial Sequence
  source: /note="Description of Artificial Sequence: Synthetic oligonucleotide"
ctcaaaacaagcaacagagac

SEQ ID NO: 33776 - DNA, 21 bp, Artificial Sequence
  source: /note="Description of Artificial Sequence: Synthetic oligonucleotide"
ctcaaaacaacaaacccacca

SEQ ID NO: 33777 - DNA, 21 bp, Artificial Sequence
  source: /note="Description of Artificial Sequence: Synthetic oligonucleotide"
ctcaaaacagtccacagcgac

SEQ ID NO: 33778 - DNA, 21 bp, Artificial Sequence
  source: /note="Description of Artificial Sequence: Synthetic oligonucleotide"
ctcaaagtcgaaatgagccca

SEQ ID NO: 33779 - DNA, 21 bp, Artificial Sequence
  source: /note="Description of Artificial Sequence: Synthetic oligonucleotide"
ctcaaatgggaacacacaagc

SEQ ID NO: 33780 - DNA, 21 bp, Artificial Sequence
  source: /note="Description of Artificial Sequence: Synthetic oligonucleotide"
ctcaaatggggaccaccagac

SEQ ID NO: 33781 - DNA, 21 bp, Artificial Sequence
  source: /note="Description of Artificial Sequence: Synthetic oligonucleotide"
ctcaaatacaacatcccagtc

SEQ ID NO: 33782 - DNA, 21 bp, Artificial Sequence
  source: /note="Description of Artificial Sequence: Synthetic oligonucleotide"
ctcctcgcagcaatgggacca

SEQ ID NO: 33783 - DNA, 21 bp, Artificial Sequence
  source: /note="Description of Artificial Sequence: Synthetic oligonucleotide"
ctcctcgcattcgaaaaacaa

SEQ ID NO: 33784 - DNA, 21 bp, Artificial Sequence
  source: /note="Description of Artificial Sequence: Synthetic oligonucleotide"
ctcctcgcaggacaccacgga

SEQ ID NO: 33785 - DNA, 21 bp, Artificial Sequence
  source: /note="Description of Artificial Sequence: Synthetic oligonucleotide"
ctcctcgcaagaggagtcaac

SEQ ID NO: 33786 - DNA, 21 bp, Artificial Sequence
  source: /note="Description of Artificial Sequence: Synthetic oligonucleotide"
ctcctcgcaacaagcctcaca

SEQ ID NO: 33787 - DNA, 21 bp, Artificial Sequence
  source: /note="Description of Artificial Sequence: Synthetic oligonucleotide"
ctcctcgacggaagagcaaga

SEQ ID NO: 33788 - DNA, 21 bp, Artificial Sequence
  source: /note="Description of Artificial Sequence: Synthetic oligonucleotide"
ctcctcgacaaagaaagagaa

SEQ ID NO: 33789 - DNA, 21 bp, Artificial Sequence
  source: /note="Description of Artificial Sequence: Synthetic oligonucleotide"
ctcctcgaccaagacttcttc

SEQ ID NO: 33790 - DNA, 21 bp, Artificial Sequence
  source: /note="Description of Artificial Sequence: Synthetic oligonucleotide"
ctcctcgacacaggagtccca

SEQ ID NO: 33791 - DNA, 21 bp, Artificial Sequence
  source: /note="Description of Artificial Sequence: Synthetic oligonucleotide"
ctcctcgaaaaaggacaaagc

SEQ ID NO: 33792 - DNA, 21 bp, Artificial Sequence
  source: /note="Description of Artificial Sequence: Synthetic oligonucleotide"
ctcctcgaaagaagctaccca

SEQ ID NO: 33793 - DNA, 21 bp, Artificial Sequence
  source: /note="Description of Artificial Sequence: Synthetic oligonucleotide"
ctcctcgaagtcccaatcaga

SEQ ID NO: 33794 - DNA, 21 bp, Artificial Sequence
  source: /note="Description of Artificial Sequence: Synthetic oligonucleotide"
ctcctcttcaaaagcagcagc

SEQ ID NO: 33795 - DNA, 21 bp, Artificial Sequence
  source: /note="Description of Artificial Sequence: Synthetic oligonucleotide"
ctcctcggagcaagacacctc

SEQ ID NO: 33796 - DNA, 21 bp, Artificial Sequence
  source: /note="Description of Artificial Sequence: Synthetic oligonucleotide"
ctcctcggagcaagcagcgca

SEQ ID NO: 33797 - DNA, 21 bp, Artificial Sequence
  source: /note="Description of Artificial Sequence: Synthetic oligonucleotide"
ctcctcggacacgcagcaagc

SEQ ID NO: 33798 - DNA, 21 bp, Artificial Sequence
  source: /note="Description of Artificial Sequence: Synthetic oligonucleotide"
ctcctcggaccagacccaagc

SEQ ID NO: 33799 - DNA, 21 bp, Artificial Sequence
  source: /note="Description of Artificial Sequence: Synthetic oligonucleotide"
ctcctcggaccactccaagga

SEQ ID NO: 33800 - DNA, 21 bp, Artificial Sequence
  source: /note="Description of Artificial Sequence: Synthetic oligonucleotide"
ctcctcggaagactccaacca

SEQ ID NO: 33801 - DNA, 21 bp, Artificial Sequence
  source: /note="Description of Artificial Sequence: Synthetic oligonucleotide"
ctcctcggaagaagcacagga

SEQ ID NO: 33802 - DNA, 21 bp, Artificial Sequence
  source: /note="Description of Artificial Sequence: Synthetic oligonucleotide"
ctcctcggaagcagaccaagc

SEQ ID NO: 33803 - DNA, 21 bp, Artificial Sequence
  source: /note="Description of Artificial Sequence: Synthetic oligonucleotide"
ctcctcggagtcctccaccca

SEQ ID NO: 33804 - DNA, 21 bp, Artificial Sequence
  source: /note="Description of Artificial Sequence: Synthetic oligonucleotide"
ctcctcggagtcacaaaccca

SEQ ID NO: 33805 - DNA, 21 bp, Artificial Sequence
  source: /note="Description of Artificial Sequence: Synthetic oligonucleotide"
ctcctccacctcggacaaaca

SEQ ID NO: 33806 - DNA, 21 bp, Artificial Sequence
  source: /note="Description of Artificial Sequence: Synthetic oligonucleotide"
ctcctccacccagcaccaaga

SEQ ID NO: 33807 - DNA, 21 bp, Artificial Sequence
  source: /note="Description of Artificial Sequence: Synthetic oligonucleotide"
ctcctccacccagaagcaatc

SEQ ID NO: 33808 - DNA, 21 bp, Artificial Sequence
  source: /note="Description of Artificial Sequence: Synthetic oligonucleotide"
ctcctccacagcagcagccaa

SEQ ID NO: 33809 - DNA, 21 bp, Artificial Sequence
  source: /note="Description of Artificial Sequence: Synthetic oligonucleotide"
ctcctccacacacaaggaaac

SEQ ID NO: 33810 - DNA, 21 bp, Artificial Sequence
  source: /note="Description of Artificial Sequence: Synthetic oligonucleotide"
ctcctccacacagtcagcgaa

SEQ ID NO: 33811 - DNA, 21 bp, Artificial Sequence
  source: /note="Description of Artificial Sequence: Synthetic oligonucleotide"
ctcctccacgtcccaagagaa

SEQ ID NO: 33812 - DNA, 21 bp, Artificial Sequence
  source: /note="Description of Artificial Sequence: Synthetic oligonucleotide"
ctcctcatctgcggagaacac

SEQ ID NO: 33813 - DNA, 21 bp, Artificial Sequence
  source: /note="Description of Artificial Sequence: Synthetic oligonucleotide"
ctcctcaaaggattcagcgtc

SEQ ID NO: 33814 - DNA, 21 bp, Artificial Sequence
  source: /note="Description of Artificial Sequence: Synthetic oligonucleotide"
ctcctcaaaccagcagcacca

SEQ ID NO: 33815 - DNA, 21 bp, Artificial Sequence
  source: /note="Description of Artificial Sequence: Synthetic oligonucleotide"
ctcctcaaaagcccagtccca

SEQ ID NO: 33816 - DNA, 21 bp, Artificial Sequence
  source: /note="Description of Artificial Sequence: Synthetic oligonucleotide"
ctcctcctcgcaccaacaagc

SEQ ID NO: 33817 - DNA, 21 bp, Artificial Sequence
  source: /note="Description of Artificial Sequence: Synthetic oligonucleotide"
ctcctcctcgcaagaacagtc

SEQ ID NO: 33818 - DNA, 21 bp, Artificial Sequence
  source: /note="Description of Artificial Sequence: Synthetic oligonucleotide"
ctcctcctcgacgaccacaca

SEQ ID NO: 33819 - DNA, 21 bp, Artificial Sequence
  source: /note="Description of Artificial Sequence: Synthetic oligonucleotide"
ctcctcctcccagcaagagga

SEQ ID NO: 33820 - DNA, 21 bp, Artificial Sequence
  source: /note="Description of Artificial Sequence: Synthetic oligonucleotide"
ctcctcctccaagcaagagca

SEQ ID NO: 33821 - DNA, 21 bp, Artificial Sequence
  source: /note="Description of Artificial Sequence: Synthetic oligonucleotide"
ctcctcctccaaaaaggacca

SEQ ID NO: 33822 - DNA, 21 bp, Artificial Sequence
  source: /note="Description of Artificial Sequence: Synthetic oligonucleotide"
ctcctcctcagagcagacgga

SEQ ID NO: 33823 - DNA, 21 bp, Artificial Sequence
  source: /note="Description of Artificial Sequence: Synthetic oligonucleotide"
ctcctcctcagcgtcggaaca

SEQ ID NO: 33824 - DNA, 21 bp, Artificial Sequence
  source: /note="Description of Artificial Sequence: Synthetic oligonucleotide"
ctcctcctcacaggagtcgca

SEQ ID NO: 33825 - DNA, 21 bp, Artificial Sequence
  source: /note="Description of Artificial Sequence: Synthetic oligonucleotide"
ctcctcatgccaagcggactc

SEQ ID NO: 33826 - DNA, 21 bp, Artificial Sequence
  source: /note="Description of Artificial Sequence: Synthetic oligonucleotide"
ctcctcaacgacgcatacgtc

SEQ ID NO: 33827 - DNA, 21 bp, Artificial Sequence
  source: /note="Description of Artificial Sequence: Synthetic oligonucleotide"
ctcctcaacggacacgaagca

SEQ ID NO: 33828 - DNA, 21 bp, Artificial Sequence
  source: /note="Description of Artificial Sequence: Synthetic oligonucleotide"
ctcctcaacatggcaagaaca

SEQ ID NO: 33829 - DNA, 21 bp, Artificial Sequence
  source: /note="Description of Artificial Sequence: Synthetic oligonucleotide"
ctcctcaacacaagcagcgca

SEQ ID NO: 33830 - DNA, 21 bp, Artificial Sequence
  source: /note="Description of Artificial Sequence: Synthetic oligonucleotide"
ctcctcccagcagaaagagca

SEQ ID NO: 33831 - DNA, 21 bp, Artificial Sequence
  source: /note="Description of Artificial Sequence: Synthetic oligonucleotide"
ctcctcccagaatacagcaga

SEQ ID NO: 33832 - DNA, 21 bp, Artificial Sequence
  source: /note="Description of Artificial Sequence: Synthetic oligonucleotide"
ctcctcccaggaagaacagac

SEQ ID NO: 33833 - DNA, 21 bp, Artificial Sequence
  source: /note="Description of Artificial Sequence: Synthetic oligonucleotide"
ctcctcccacacgaaggaaca

SEQ ID NO: 33834 - DNA, 21 bp, Artificial Sequence
  source: /note="Description of Artificial Sequence: Synthetic oligonucleotide"
ctcctcccaaaagcaagcagc

SEQ ID NO: 33835 - DNA, 21 bp, Artificial Sequence
  source: /note="Description of Artificial Sequence: Synthetic oligonucleotide"
ctcctcccactcgcaccaaga

SEQ ID NO: 33836 - DNA, 21 bp, Artificial Sequence
  source: /note="Description of Artificial Sequence: Synthetic oligonucleotide"
ctcctcccaaacccaccaaca

SEQ ID NO: 33837 - DNA, 21 bp, Artificial Sequence
  source: /note="Description of Artificial Sequence: Synthetic oligonucleotide"
ctcctcccaaaccaaagcttc

SEQ ID NO: 33838 - DNA, 21 bp, Artificial Sequence
  source: /note="Description of Artificial Sequence: Synthetic oligonucleotide"
ctcctcccaaacacaccacca

SEQ ID NO: 33839 - DNA, 21 bp, Artificial Sequence
  source: /note="Description of Artificial Sequence: Synthetic oligonucleotide"
ctcctcccaccaagagaccca

SEQ ID NO: 33840 - DNA, 21 bp, Artificial Sequence
  source: /note="Description of Artificial Sequence: Synthetic oligonucleotide"
ctcctcccaccaagcagcagc

SEQ ID NO: 33841 - DNA, 21 bp, Artificial Sequence
  source: /note="Description of Artificial Sequence: Synthetic oligonucleotide"
ctcctcccacaattcagaagc

SEQ ID NO: 33842 - DNA, 21 bp, Artificial Sequence
  source: /note="Description of Artificial Sequence: Synthetic oligonucleotide"
ctcctcccaagaacacactac

SEQ ID NO: 33843 - DNA, 21 bp, Artificial Sequence
  source: /note="Description of Artificial Sequence: Synthetic oligonucleotide"
ctcctcccaagcctcgcaagc

SEQ ID NO: 33844 - DNA, 21 bp, Artificial Sequence
  source: /note="Description of Artificial Sequence: Synthetic oligonucleotide"
ctcctcccaagcagaggagca

SEQ ID NO: 33845 - DNA, 21 bp, Artificial Sequence
  source: /note="Description of Artificial Sequence: Synthetic oligonucleotide"
ctcctcccaacaagcaaactc

SEQ ID NO: 33846 - DNA, 21 bp, Artificial Sequence
  source: /note="Description of Artificial Sequence: Synthetic oligonucleotide"
ctcctcccagtcctcagcgaa

SEQ ID NO: 33847 - DNA, 21 bp, Artificial Sequence
  source: /note="Description of Artificial Sequence: Synthetic oligonucleotide"
ctcctccaaccaagcgtccca

SEQ ID NO: 33848 - DNA, 21 bp, Artificial Sequence
  source: /note="Description of Artificial Sequence: Synthetic oligonucleotide"
ctcctccaacaaccagaatgg

SEQ ID NO: 33849 - DNA, 21 bp, Artificial Sequence
  source: /note="Description of Artificial Sequence: Synthetic oligonucleotide"
ctcctccaaagaagcctcagc

SEQ ID NO: 33850 - DNA, 21 bp, Artificial Sequence
  source: /note="Description of Artificial Sequence: Synthetic oligonucleotide"
ctcctccaaacactcaaacca

SEQ ID NO: 33851 - DNA, 21 bp, Artificial Sequence
  source: /note="Description of Artificial Sequence: Synthetic oligonucleotide"
ctcctcagaggagcagtcgca

SEQ ID NO: 33852 - DNA, 21 bp, Artificial Sequence
  source: /note="Description of Artificial Sequence: Synthetic oligonucleotide"
ctcctcagaggagacgcagca

SEQ ID NO: 33853 - DNA, 21 bp, Artificial Sequence
  source: /note="Description of Artificial Sequence: Synthetic oligonucleotide"
ctcctcagaaaagacgaagca

SEQ ID NO: 33854 - DNA, 21 bp, Artificial Sequence
  source: /note="Description of Artificial Sequence: Synthetic oligonucleotide"
ctcctcagaaacaacccacac

SEQ ID NO: 33855 - DNA, 21 bp, Artificial Sequence
  source: /note="Description of Artificial Sequence: Synthetic oligonucleotide"
ctcctcagaaacgtcctccca

SEQ ID NO: 33856 - DNA, 21 bp, Artificial Sequence
  source: /note="Description of Artificial Sequence: Synthetic oligonucleotide"
ctcctcagaagccaaagcgca

SEQ ID NO: 33857 - DNA, 21 bp, Artificial Sequence
  source: /note="Description of Artificial Sequence: Synthetic oligonucleotide"
ctcctcagaacaccaagcagc

SEQ ID NO: 33858 - DNA, 21 bp, Artificial Sequence
  source: /note="Description of Artificial Sequence: Synthetic oligonucleotide"
ctcctcagagtcccaaaccca

SEQ ID NO: 33859 - DNA, 21 bp, Artificial Sequence
  source: /note="Description of Artificial Sequence: Synthetic oligonucleotide"
ctcctcagcgcagcagacaga

SEQ ID NO: 33860 - DNA, 21 bp, Artificial Sequence
  source: /note="Description of Artificial Sequence: Synthetic oligonucleotide"
ctcctcagcgcaccatacaca

SEQ ID NO: 33861 - DNA, 21 bp, Artificial Sequence
  source: /note="Description of Artificial Sequence: Synthetic oligonucleotide"
ctcctcagcgcaagcacaagc

SEQ ID NO: 33862 - DNA, 21 bp, Artificial Sequence
  source: /note="Description of Artificial Sequence: Synthetic oligonucleotide"
ctcctcagcgacagcgcaaga

SEQ ID NO: 33863 - DNA, 21 bp, Artificial Sequence
  source: /note="Description of Artificial Sequence: Synthetic oligonucleotide"
ctcctcagcttcacaacagac

SEQ ID NO: 33864 - DNA, 21 bp, Artificial Sequence
  source: /note="Description of Artificial Sequence: Synthetic oligonucleotide"
ctcctcagcggagcactccaa

SEQ ID NO: 33865 - DNA, 21 bp, Artificial Sequence
  source: /note="Description of Artificial Sequence: Synthetic oligonucleotide"
ctcctcagcggaagagtcaca

SEQ ID NO: 33866 - DNA, 21 bp, Artificial Sequence
  source: /note="Description of Artificial Sequence: Synthetic oligonucleotide"
ctcctcagcaaaggacacagc

SEQ ID NO: 33867 - DNA, 21 bp, Artificial Sequence
  source: /note="Description of Artificial Sequence: Synthetic oligonucleotide"
ctcctcagcatgagaacacca

SEQ ID NO: 33868 - DNA, 21 bp, Artificial Sequence
  source: /note="Description of Artificial Sequence: Synthetic oligonucleotide"
ctcctcagcccagacgaatac

SEQ ID NO: 33869 - DNA, 21 bp, Artificial Sequence
  source: /note="Description of Artificial Sequence: Synthetic oligonucleotide"
ctcctcagcccaggaccactc

SEQ ID NO: 33870 - DNA, 21 bp, Artificial Sequence
  source: /note="Description of Artificial Sequence: Synthetic oligonucleotide"
ctcctcagcagagtccacgac

SEQ ID NO: 33871 - DNA, 21 bp, Artificial Sequence
  source: /note="Description of Artificial Sequence: Synthetic oligonucleotide"
ctcctcagcacagcagtcagc

SEQ ID NO: 33872 - DNA, 21 bp, Artificial Sequence
  source: /note="Description of Artificial Sequence: Synthetic oligonucleotide"
ctcctcagcacagacggaagc

SEQ ID NO: 33873 - DNA, 21 bp, Artificial Sequence
  source: /note="Description of Artificial Sequence: Synthetic oligonucleotide"
ctcctcagcgtccacgaaatg

SEQ ID NO: 33874 - DNA, 21 bp, Artificial Sequence
  source: /note="Description of Artificial Sequence: Synthetic oligonucleotide"
ctcctcacagacgaatgcaca

SEQ ID NO: 33875 - DNA, 21 bp, Artificial Sequence
  source: /note="Description of Artificial Sequence: Synthetic oligonucleotide"
ctcctcacagacagaagactc

SEQ ID NO: 33876 - DNA, 21 bp, Artificial Sequence
  source: /note="Description of Artificial Sequence: Synthetic oligonucleotide"
ctcctcacacacttcagcagc

SEQ ID NO: 33877 - DNA, 21 bp, Artificial Sequence
  source: /note="Description of Artificial Sequence: Synthetic oligonucleotide"
ctcctcacaatcggaaaacca

SEQ ID NO: 33878 - DNA, 21 bp, Artificial Sequence
  source: /note="Description of Artificial Sequence: Synthetic oligonucleotide"
ctcctcacactcagcgaagtc

SEQ ID NO: 33879 - DNA, 21 bp, Artificial Sequence
  source: /note="Description of Artificial Sequence: Synthetic oligonucleotide"
ctcctcacactcagcacacca

SEQ ID NO: 33880 - DNA, 21 bp, Artificial Sequence
  source: /note="Description of Artificial Sequence: Synthetic oligonucleotide"
ctcctcacaaacgcaatccca

SEQ ID NO: 33881 - DNA, 21 bp, Artificial Sequence
  source: /note="Description of Artificial Sequence: Synthetic oligonucleotide"
ctcctcacaccatacaaccca

SEQ ID NO: 33882 - DNA, 21 bp, Artificial Sequence
  source: /note="Description of Artificial Sequence: Synthetic oligonucleotide"
ctcctcacaagaagcacagaa

SEQ ID NO: 33883 - DNA, 21 bp, Artificial Sequence
  source: /note="Description of Artificial Sequence: Synthetic oligonucleotide"
ctcctcgtccacaaagtcgtc

SEQ ID NO: 33884 - DNA, 21 bp, Artificial Sequence
  source: /note="Description of Artificial Sequence: Synthetic oligonucleotide"
ctcctcgtcagacacagagac

SEQ ID NO: 33885 - DNA, 21 bp, Artificial Sequence
  source: /note="Description of Artificial Sequence: Synthetic oligonucleotide"
ctcctcgtcagaaacacagac

SEQ ID NO: 33886 - DNA, 21 bp, Artificial Sequence
  source: /note="Description of Artificial Sequence: Synthetic oligonucleotide"
ctcctcgtcagcgaaaacagc

SEQ ID NO: 33887 - DNA, 21 bp, Artificial Sequence
  source: /note="Description of Artificial Sequence: Synthetic oligonucleotide"
ctcctcgtcacagacaaaatg

SEQ ID NO: 33888 - DNA, 21 bp, Artificial Sequence
  source: /note="Description of Artificial Sequence: Synthetic oligonucleotide"
ctcctcgtcgtcccaagcaga

SEQ ID NO: 33889 - DNA, 21 bp, Artificial Sequence
  source: /note="Description of Artificial Sequence: Synthetic oligonucleotide"
ctcctctacgcagaaagacca

SEQ ID NO: 33890 - DNA, 21 bp, Artificial Sequence
  source: /note="Description of Artificial Sequence: Synthetic oligonucleotide"
ctcctctaccaaaacagcagc

SEQ ID NO: 33891 - DNA, 21 bp, Artificial Sequence
  source: /note="Description of Artificial Sequence: Synthetic oligonucleotide"
ctcctctacagcacagacaaa

SEQ ID NO: 33892 - DNA, 21 bp, Artificial Sequence
  source: /note="Description of Artificial Sequence: Synthetic oligonucleotide"
ctcatggcacacagccaactc

SEQ ID NO: 33893 - DNA, 21 bp, Artificial Sequence
  source: /note="Description of Artificial Sequence: Synthetic oligonucleotide"
ctcatggcaatccacaaacca

SEQ ID NO: 33894 - DNA, 21 bp, Artificial Sequence
  source: /note="Description of Artificial Sequence: Synthetic oligonucleotide"
ctcatggcaacaagagtccca

SEQ ID NO: 33895 - DNA, 21 bp, Artificial Sequence
  source: /note="Description of Artificial Sequence: Synthetic oligonucleotide"
ctcatggacagcagaaaatac

SEQ ID NO: 33896 - DNA, 21 bp, Artificial Sequence
  source: /note="Description of Artificial Sequence: Synthetic oligonucleotide"
ctcatggaagcaacattcaaa

SEQ ID NO: 33897 - DNA, 21 bp, Artificial Sequence
  source: /note="Description of Artificial Sequence: Synthetic oligonucleotide"
ctcatggaacacatcatcgaa

SEQ ID NO: 33898 - DNA, 21 bp, Artificial Sequence
  source: /note="Description of Artificial Sequence: Synthetic oligonucleotide"
ctcatggaaaaccacatggca

SEQ ID NO: 33899 - DNA, 21 bp, Artificial Sequence
  source: /note="Description of Artificial Sequence: Synthetic oligonucleotide"
ctcatgggacaaggaagaaca

SEQ ID NO: 33900 - DNA, 21 bp, Artificial Sequence
  source: /note="Description of Artificial Sequence: Synthetic oligonucleotide"
ctcatgggacaagtcgcagga

SEQ ID NO: 33901 - DNA, 21 bp, Artificial Sequence
  source: /note="Description of Artificial Sequence: Synthetic oligonucleotide"
ctcatgaaaccaagcgcagga

SEQ ID NO: 33902 - DNA, 21 bp, Artificial Sequence
  source: /note="Description of Artificial Sequence: Synthetic oligonucleotide"
ctcatgaaaagagtcgaaaca

SEQ ID NO: 33903 - DNA, 21 bp, Artificial Sequence
  source: /note="Description of Artificial Sequence: Synthetic oligonucleotide"
ctcatgctcgcaagaaacgac

SEQ ID NO: 33904 - DNA, 21 bp, Artificial Sequence
  source: /note="Description of Artificial Sequence: Synthetic oligonucleotide"
ctcatgctcagaagcagccaa

SEQ ID NO: 33905 - DNA, 21 bp, Artificial Sequence
  source: /note="Description of Artificial Sequence: Synthetic oligonucleotide"
ctcatgaacggaggaagcaca

SEQ ID NO: 33906 - DNA, 21 bp, Artificial Sequence
  source: /note="Description of Artificial Sequence: Synthetic oligonucleotide"
ctcatgaacagcgcaatcgca

SEQ ID NO: 33907 - DNA, 21 bp, Artificial Sequence
  source: /note="Description of Artificial Sequence: Synthetic oligonucleotide"
ctcatgccaagcatgagacca

SEQ ID NO: 33908 - DNA, 21 bp, Artificial Sequence
  source: /note="Description of Artificial Sequence: Synthetic oligonucleotide"
ctcatgcaaccaaaaagcgca

SEQ ID NO: 33909 - DNA, 21 bp, Artificial Sequence
  source: /note="Description of Artificial Sequence: Synthetic oligonucleotide"
ctcatgagaatcagcacagca

SEQ ID NO: 33910 - DNA, 21 bp, Artificial Sequence
  source: /note="Description of Artificial Sequence: Synthetic oligonucleotide"
ctcatgagaccagcagaactc

SEQ ID NO: 33911 - DNA, 21 bp, Artificial Sequence
  source: /note="Description of Artificial Sequence: Synthetic oligonucleotide"
ctcatgagaacaaacccagac

SEQ ID NO: 33912 - DNA, 21 bp, Artificial Sequence
  source: /note="Description of Artificial Sequence: Synthetic oligonucleotide"
ctcatgagcctcacaacagtc

SEQ ID NO: 33913 - DNA, 21 bp, Artificial Sequence
  source: /note="Description of Artificial Sequence: Synthetic oligonucleotide"
ctcatgagcccacaaagccca

SEQ ID NO: 33914 - DNA, 21 bp, Artificial Sequence
  source: /note="Description of Artificial Sequence: Synthetic oligonucleotide"
ctcatgagccaagaactcaga

SEQ ID NO: 33915 - DNA, 21 bp, Artificial Sequence
  source: /note="Description of Artificial Sequence: Synthetic oligonucleotide"
ctcatgagccaaacacaaaga

SEQ ID NO: 33916 - DNA, 21 bp, Artificial Sequence
  source: /note="Description of Artificial Sequence: Synthetic oligonucleotide"
ctcatgagcagcaaaccacca

SEQ ID NO: 33917 - DNA, 21 bp, Artificial Sequence
  source: /note="Description of Artificial Sequence: Synthetic oligonucleotide"
ctcatgagcacagcagaacca

SEQ ID NO: 33918 - DNA, 21 bp, Artificial Sequence
  source: /note="Description of Artificial Sequence: Synthetic oligonucleotide"
ctcatgagcacagcaagccca

SEQ ID NO: 33919 - DNA, 21 bp, Artificial Sequence
  source: /note="Description of Artificial Sequence: Synthetic oligonucleotide"
ctcatgacaggaatcacaatc

SEQ ID NO: 33920 - DNA, 21 bp, Artificial Sequence
  source: /note="Description of Artificial Sequence: Synthetic oligonucleotide"
ctcatgacaggagtcccactc

SEQ ID NO: 33921 - DNA, 21 bp, Artificial Sequence
  source: /note="Description of Artificial Sequence: Synthetic oligonucleotide"
ctcatgacaaacgcacaactc

SEQ ID NO: 33922 - DNA, 21 bp, Artificial Sequence
  source: /note="Description of Artificial Sequence: Synthetic oligonucleotide"
ctcatgacaaacccagtccca

SEQ ID NO: 33923 - DNA, 21 bp, Artificial Sequence
  source: /note="Description of Artificial Sequence: Synthetic oligonucleotide"
ctcatgacaagcggacacaaa

SEQ ID NO: 33924 - DNA, 21 bp, Artificial Sequence
  source: /note="Description of Artificial Sequence: Synthetic oligonucleotide"
ctcatgacaagcaacggagca

SEQ ID NO: 33925 - DNA, 21 bp, Artificial Sequence
  source: /note="Description of Artificial Sequence: Synthetic oligonucleotide"
ctcatgacaacacacgtcgac

SEQ ID NO: 33926 - DNA, 21 bp, Artificial Sequence
  source: /note="Description of Artificial Sequence: Synthetic oligonucleotide"
ctcatggtcgaaagccacgtc

SEQ ID NO: 33927 - DNA, 21 bp, Artificial Sequence
  source: /note="Description of Artificial Sequence: Synthetic oligonucleotide"
ctcatggtcggaagaaaactc

SEQ ID NO: 33928 - DNA, 21 bp, Artificial Sequence
  source: /note="Description of Artificial Sequence: Synthetic oligonucleotide"
ctcaacgcaaacgcactcgca

SEQ ID NO: 33929 - DNA, 21 bp, Artificial Sequence
  source: /note="Description of Artificial Sequence: Synthetic oligonucleotide"
ctcaacgcaccaggaagaaca

SEQ ID NO: 33930 - DNA, 21 bp, Artificial Sequence
  source: /note="Description of Artificial Sequence: Synthetic oligonucleotide"
ctcaacgcaccaaacccaatg

SEQ ID NO: 33931 - DNA, 21 bp, Artificial Sequence
  source: /note="Description of Artificial Sequence: Synthetic oligonucleotide"
ctcaacgcacaagtcagcaca

SEQ ID NO: 33932 - DNA, 21 bp, Artificial Sequence
  source: /note="Description of Artificial Sequence: Synthetic oligonucleotide"
ctcaacgcaagcacaaaaaca

SEQ ID NO: 33933 - DNA, 21 bp, Artificial Sequence
  source: /note="Description of Artificial Sequence: Synthetic oligonucleotide"
ctcaacgcaacagacggaaaa

SEQ ID NO: 33934 - DNA, 21 bp, Artificial Sequence
  source: /note="Description of Artificial Sequence: Synthetic oligonucleotide"
ctcaacgacgacgcatggagc

SEQ ID NO: 33935 - DNA, 21 bp, Artificial Sequence
  source: /note="Description of Artificial Sequence: Synthetic oligonucleotide"
ctcaacgacgtcctcacacaa

SEQ ID NO: 33936 - DNA, 21 bp, Artificial Sequence
  source: /note="Description of Artificial Sequence: Synthetic oligonucleotide"
ctcaacgaaatcacaagaagc

SEQ ID NO: 33937 - DNA, 21 bp, Artificial Sequence
  source: /note="Description of Artificial Sequence: Synthetic oligonucleotide"
ctcaacgaactccaattccaa

SEQ ID NO: 33938 - DNA, 21 bp, Artificial Sequence
  source: /note="Description of Artificial Sequence: Synthetic oligonucleotide"
ctcaacgaaagaccaagaagc

SEQ ID NO: 33939 - DNA, 21 bp, Artificial Sequence
  source: /note="Description of Artificial Sequence: Synthetic oligonucleotide"
ctcaacggagaatacctcaaa

SEQ ID NO: 33940 - DNA, 21 bp, Artificial Sequence
  source: /note="Description of Artificial Sequence: Synthetic oligonucleotide"
ctcaacggattcacagcaaca

SEQ ID NO: 33941 - DNA, 21 bp, Artificial Sequence
  source: /note="Description of Artificial Sequence: Synthetic oligonucleotide"
ctcaacggaagaagagcagaa

SEQ ID NO: 33942 - DNA, 21 bp, Artificial Sequence
  source: /note="Description of Artificial Sequence: Synthetic oligonucleotide"
ctcaacggaagctacatccaa

SEQ ID NO: 33943 - DNA, 21 bp, Artificial Sequence
  source: /note="Description of Artificial Sequence: Synthetic oligonucleotide"
ctcaaccacgaaaaagacgga

SEQ ID NO: 33944 - DNA, 21 bp, Artificial Sequence
  source: /note="Description of Artificial Sequence: Synthetic oligonucleotide"
ctcaaccacaacccaggactc

SEQ ID NO: 33945 - DNA, 21 bp, Artificial Sequence
  source: /note="Description of Artificial Sequence: Synthetic oligonucleotide"
ctcaaccacaacagcctcaga

SEQ ID NO: 33946 - DNA, 21 bp, Artificial Sequence
  source: /note="Description of Artificial Sequence: Synthetic oligonucleotide"
ctcaaccacacaagaccactc

SEQ ID NO: 33947 - DNA, 21 bp, Artificial Sequence
  source: /note="Description of Artificial Sequence: Synthetic oligonucleotide"
ctcaacatcccaagcgaccca

SEQ ID NO: 33948 - DNA, 21 bp, Artificial Sequence
  source: /note="Description of Artificial Sequence: Synthetic oligonucleotide"
ctcaacatcacaacaagcgga

SEQ ID NO: 33949 - DNA, 21 bp, Artificial Sequence
  source: /note="Description of Artificial Sequence: Synthetic oligonucleotide"
ctcaacaaagaattcgcaagc

SEQ ID NO: 33950 - DNA, 21 bp, Artificial Sequence
  source: /note="Description of Artificial Sequence: Synthetic oligonucleotide"
ctcaacaaaaacagcccagtc

SEQ ID NO: 33951 - DNA, 21 bp, Artificial Sequence
  source: /note="Description of Artificial Sequence: Synthetic oligonucleotide"
ctcaacaaacaaccattcgtc

SEQ ID NO: 33952 - DNA, 21 bp, Artificial Sequence
  source: /note="Description of Artificial Sequence: Synthetic oligonucleotide"
ctcaacaaaagagcaccagac

SEQ ID NO: 33953 - DNA, 21 bp, Artificial Sequence
  source: /note="Description of Artificial Sequence: Synthetic oligonucleotide"
ctcaacaaaagcagcacagga

SEQ ID NO: 33954 - DNA, 21 bp, Artificial Sequence
  source: /note="Description of Artificial Sequence: Synthetic oligonucleotide"
ctcaacctcgcaagaccagca

SEQ ID NO: 33955 - DNA, 21 bp, Artificial Sequence
  source: /note="Description of Artificial Sequence: Synthetic oligonucleotide"
ctcaacctcgaactctacgac

SEQ ID NO: 33956 - DNA, 21 bp, Artificial Sequence
  source: /note="Description of Artificial Sequence: Synthetic oligonucleotide"
ctcaacctcggaagaccagac

SEQ ID NO: 33957 - DNA, 21 bp, Artificial Sequence
  source: /note="Description of Artificial Sequence: Synthetic oligonucleotide"
ctcaacctccacgcaccaaca

SEQ ID NO: 33958 - DNA, 21 bp, Artificial Sequence
  source: /note="Description of Artificial Sequence: Synthetic oligonucleotide"
ctcaacctcccaaaccacgga

SEQ ID NO: 33959 - DNA, 21 bp, Artificial Sequence
  source: /note="Description of Artificial Sequence: Synthetic oligonucleotide"
ctcaacctccaaagccaaagc

SEQ ID NO: 33960 - DNA, 21 bp, Artificial Sequence
  source: /note="Description of Artificial Sequence: Synthetic oligonucleotide"
ctcaacctcagcggactcgtc

SEQ ID NO: 33961 - DNA, 21 bp, Artificial Sequence
  source: /note="Description of Artificial Sequence: Synthetic oligonucleotide"
ctcaacctcacaagcgtcagc

SEQ ID NO: 33962 - DNA, 21 bp, Artificial Sequence
  source: /note="Description of Artificial Sequence: Synthetic oligonucleotide"
ctcaacatgagcgaaccaaga

SEQ ID NO: 33963 - DNA, 21 bp, Artificial Sequence
  source: /note="Description of Artificial Sequence: Synthetic oligonucleotide"
ctcaacatgagcccaacagga

SEQ ID NO: 33964 - DNA, 21 bp, Artificial Sequence
  source: /note="Description of Artificial Sequence: Synthetic oligonucleotide"
ctcaacaaccaccaattcagc

SEQ ID NO: 33965 - DNA, 21 bp, Artificial Sequence
  source: /note="Description of Artificial Sequence: Synthetic oligonucleotide"
ctcaacaacctcccaagcaga

SEQ ID NO: 33966 - DNA, 21 bp, Artificial Sequence
  source: /note="Description of Artificial Sequence: Synthetic oligonucleotide"
ctcaacccagcagcaagaatc

SEQ ID NO: 33967 - DNA, 21 bp, Artificial Sequence
  source: /note="Description of Artificial Sequence: Synthetic oligonucleotide"
ctcaacccagcaaaagcaagc

SEQ ID NO: 33968 - DNA, 21 bp, Artificial Sequence
  source: /note="Description of Artificial Sequence: Synthetic oligonucleotide"
ctcaacccacacgaaaacgga

SEQ ID NO: 33969 - DNA, 21 bp, Artificial Sequence
  source: /note="Description of Artificial Sequence: Synthetic oligonucleotide"
ctcaacccaagcagagtccca

SEQ ID NO: 33970 - DNA, 21 bp, Artificial Sequence
  source: /note="Description of Artificial Sequence: Synthetic oligonucleotide"
ctcaacccagtcaacgtcatg

SEQ ID NO: 33971 - DNA, 21 bp, Artificial Sequence
  source: /note="Description of Artificial Sequence: Synthetic oligonucleotide"
ctcaaccaaggaaacatgaca

SEQ ID NO: 33972 - DNA, 21 bp, Artificial Sequence
  source: /note="Description of Artificial Sequence: Synthetic oligonucleotide"
ctcaaccaacacgtcccagtc

SEQ ID NO: 33973 - DNA, 21 bp, Artificial Sequence
  source: /note="Description of Artificial Sequence: Synthetic oligonucleotide"
ctcaaccaaagcagaagcaca

SEQ ID NO: 33974 - DNA, 21 bp, Artificial Sequence
  source: /note="Description of Artificial Sequence: Synthetic oligonucleotide"
ctcaaccaaagcgtcagagtc

SEQ ID NO: 33975 - DNA, 21 bp, Artificial Sequence
  source: /note="Description of Artificial Sequence: Synthetic oligonucleotide"
ctcaacagagcagacgtcgac

SEQ ID NO: 33976 - DNA, 21 bp, Artificial Sequence
  source: /note="Description of Artificial Sequence: Synthetic oligonucleotide"
ctcaacagagacatgagctac

SEQ ID NO: 33977 - DNA, 21 bp, Artificial Sequence
  source: /note="Description of Artificial Sequence: Synthetic oligonucleotide"
ctcaacagagaacaagcaagc

SEQ ID NO: 33978 - DNA, 21 bp, Artificial Sequence
  source: /note="Description of Artificial Sequence: Synthetic oligonucleotide"
ctcaacagaagcagcatgcca

SEQ ID NO: 33979 - DNA, 21 bp, Artificial Sequence
  source: /note="Description of Artificial Sequence: Synthetic oligonucleotide"
ctcaacagaacaaacccagac

SEQ ID NO: 33980 - DNA, 21 bp, Artificial Sequence
  source: /note="Description of Artificial Sequence: Synthetic oligonucleotide"
ctcaacagagtcacaccaagc

SEQ ID NO: 33981 - DNA, 21 bp, Artificial Sequence
  source: /note="Description of Artificial Sequence: Synthetic oligonucleotide"
ctcaacagcgacgcaccatac

SEQ ID NO: 33982 - DNA, 21 bp, Artificial Sequence
  source: /note="Description of Artificial Sequence: Synthetic oligonucleotide"
ctcaacagcctcggaacattc

SEQ ID NO: 33983 - DNA, 21 bp, Artificial Sequence
  source: /note="Description of Artificial Sequence: Synthetic oligonucleotide"
ctcaacagcccactcatcgca

SEQ ID NO: 33984 - DNA, 21 bp, Artificial Sequence
  source: /note="Description of Artificial Sequence: Synthetic oligonucleotide"
ctcaacagccaaccaggactc

SEQ ID NO: 33985 - DNA, 21 bp, Artificial Sequence
  source: /note="Description of Artificial Sequence: Synthetic oligonucleotide"
ctcaacagccaaagattcgga

SEQ ID NO: 33986 - DNA, 21 bp, Artificial Sequence
  source: /note="Description of Artificial Sequence: Synthetic oligonucleotide"
ctcaacagcagccacgacgca

SEQ ID NO: 33987 - DNA, 21 bp, Artificial Sequence
  source: /note="Description of Artificial Sequence: Synthetic oligonucleotide"
ctcaacagcagcagaagcgca

SEQ ID NO: 33988 - DNA, 21 bp, Artificial Sequence
  source: /note="Description of Artificial Sequence: Synthetic oligonucleotide"
ctcaacagcagcagccacgga

SEQ ID NO: 33989 - DNA, 21 bp, Artificial Sequence
  source: /note="Description of Artificial Sequence: Synthetic oligonucleotide"
ctcaacagcacaaacccacac

SEQ ID NO: 33990 - DNA, 21 bp, Artificial Sequence
  source: /note="Description of Artificial Sequence: Synthetic oligonucleotide"
ctcaacagcgtcagaaacaac

SEQ ID NO: 33991 - DNA, 21 bp, Artificial Sequence
  source: /note="Description of Artificial Sequence: Synthetic oligonucleotide"
ctcaacacagcagcactccca

SEQ ID NO: 33992 - DNA, 21 bp, Artificial Sequence
  source: /note="Description of Artificial Sequence: Synthetic oligonucleotide"
ctcaacacacacagctacgtc

SEQ ID NO: 33993 - DNA, 21 bp, Artificial Sequence
  source: /note="Description of Artificial Sequence: Synthetic oligonucleotide"
ctcaacacaaaaccattcagc

SEQ ID NO: 33994 - DNA, 21 bp, Artificial Sequence
  source: /note="Description of Artificial Sequence: Synthetic oligonucleotide"
ctcaacacaagacaacaaaca

SEQ ID NO: 33995 - DNA, 21 bp, Artificial Sequence
  source: /note="Description of Artificial Sequence: Synthetic oligonucleotide"
ctcaacacaagaagcctcagc

SEQ ID NO: 33996 - DNA, 21 bp, Artificial Sequence
  source: /note="Description of Artificial Sequence: Synthetic oligonucleotide"
ctcaacgtcgaagtcgaaaga

SEQ ID NO: 33997 - DNA, 21 bp, Artificial Sequence
  source: /note="Description of Artificial Sequence: Synthetic oligonucleotide"
ctcaacgtcaaaagcggactc

SEQ ID NO: 33998 - DNA, 21 bp, Artificial Sequence
  source: /note="Description of Artificial Sequence: Synthetic oligonucleotide"
ctcaacgtcaacatcgcacca

SEQ ID NO: 33999 - DNA, 21 bp, Artificial Sequence
  source: /note="Description of Artificial Sequence: Synthetic oligonucleotide"
ctcaacgtcagagaaagcgtc

SEQ ID NO: 34000 - DNA, 21 bp, Artificial Sequence
  source: /note="Description of Artificial Sequence: Synthetic oligonucleotide"
ctcaacgtcagaagagtcgca

SEQ ID NO: 34001 - DNA, 21 bp, Artificial Sequence
  source: /note="Description of Artificial Sequence: Synthetic oligonucleotide"
ctcaacgtcagaacagacaga

SEQ ID NO: 34002 - DNA, 21 bp, Artificial Sequence
  source: /note="Description of Artificial Sequence: Synthetic oligonucleotide"
ctcaacgtcagcggaaacgca

SEQ ID NO: 34003 - DNA, 21 bp, Artificial Sequence
  source: /note="Description of Artificial Sequence: Synthetic oligonucleotide"
ctcaacgtcagcagcacagga

SEQ ID NO: 34004 - DNA, 21 bp, Artificial Sequence
  source: /note="Description of Artificial Sequence: Synthetic oligonucleotide"
ctcaacgtcgtcagcacatac

SEQ ID NO: 34005 - DNA, 21 bp, Artificial Sequence
  source: /note="Description of Artificial Sequence: Synthetic oligonucleotide"
ctcaactacgacccaatgaca

SEQ ID NO: 34006 - DNA, 21 bp, Artificial Sequence
  source: /note="Description of Artificial Sequence: Synthetic oligonucleotide"
ctcaactacggaccagcactc

SEQ ID NO: 34007 - DNA, 21 bp, Artificial Sequence
  source: /note="Description of Artificial Sequence: Synthetic oligonucleotide"
ctcaactaccacgcaagcgtc

SEQ ID NO: 34008 - DNA, 21 bp, Artificial Sequence
  source: /note="Description of Artificial Sequence: Synthetic oligonucleotide"
ctcccagcaggaaacacaagc

SEQ ID NO: 34009 - DNA, 21 bp, Artificial Sequence
  source: /note="Description of Artificial Sequence: Synthetic oligonucleotide"
ctcccagcaggaaactaccac

SEQ ID NO: 34010 - DNA, 21 bp, Artificial Sequence
  source: /note="Description of Artificial Sequence: Synthetic oligonucleotide"
ctcccagcaaacaacagcatc

SEQ ID NO: 34011 - DNA, 21 bp, Artificial Sequence
  source: /note="Description of Artificial Sequence: Synthetic oligonucleotide"
ctcccagcaccaaaaccagca

SEQ ID NO: 34012 - DNA, 21 bp, Artificial Sequence
  source: /note="Description of Artificial Sequence: Synthetic oligonucleotide"
ctcccagcaagactcgcaaca

SEQ ID NO: 34013 - DNA, 21 bp, Artificial Sequence
  source: /note="Description of Artificial Sequence: Synthetic oligonucleotide"
ctcccagcaagcggagcagca

SEQ ID NO: 34014 - DNA, 21 bp, Artificial Sequence
  source: /note="Description of Artificial Sequence: Synthetic oligonucleotide"
ctcccagcaacaagaagcatc

SEQ ID NO: 34015 - DNA, 21 bp, Artificial Sequence
  source: /note="Description of Artificial Sequence: Synthetic oligonucleotide"
ctcccagcagtctgcggacca

SEQ ID NO: 34016 - DNA, 21 bp, Artificial Sequence
  source: /note="Description of Artificial Sequence: Synthetic oligonucleotide"
ctcccagacaaaagcctcatg

SEQ ID NO: 34017 - DNA, 21 bp, Artificial Sequence
  source: /note="Description of Artificial Sequence: Synthetic oligonucleotide"
ctcccagacatgagcagagaa

SEQ ID NO: 34018 - DNA, 21 bp, Artificial Sequence
  source: /note="Description of Artificial Sequence: Synthetic oligonucleotide"
ctcccagacccaagaccagac

SEQ ID NO: 34019 - DNA, 21 bp, Artificial Sequence
  source: /note="Description of Artificial Sequence: Synthetic oligonucleotide"
ctcccagacacaatcagaagc

SEQ ID NO: 34020 - DNA, 21 bp, Artificial Sequence
  source: /note="Description of Artificial Sequence: Synthetic oligonucleotide"
ctcccagacacaagaacactc

SEQ ID NO: 34021 - DNA, 21 bp, Artificial Sequence
  source: /note="Description of Artificial Sequence: Synthetic oligonucleotide"
ctcccagacgtcgcaagatac

SEQ ID NO: 34022 - DNA, 21 bp, Artificial Sequence
  source: /note="Description of Artificial Sequence: Synthetic oligonucleotide"
ctcccagaagcaggagtccca

SEQ ID NO: 34023 - DNA, 21 bp, Artificial Sequence
  source: /note="Description of Artificial Sequence: Synthetic oligonucleotide"
ctcccagaaatcagcccacac

SEQ ID NO: 34024 - DNA, 21 bp, Artificial Sequence
  source: /note="Description of Artificial Sequence: Synthetic oligonucleotide"
ctcccagaaaacacaccatac

SEQ ID NO: 34025 - DNA, 21 bp, Artificial Sequence
  source: /note="Description of Artificial Sequence: Synthetic oligonucleotide"
ctcccagaacaaacagtcatc

SEQ ID NO: 34026 - DNA, 21 bp, Artificial Sequence
  source: /note="Description of Artificial Sequence: Synthetic oligonucleotide"
ctcccagaaagagtcggactc

SEQ ID NO: 34027 - DNA, 21 bp, Artificial Sequence
  source: /note="Description of Artificial Sequence: Synthetic oligonucleotide"
ctcccagaaacaggaatgagc

SEQ ID NO: 34028 - DNA, 21 bp, Artificial Sequence
  source: /note="Description of Artificial Sequence: Synthetic oligonucleotide"
ctcccattcgcaacaagccca

SEQ ID NO: 34029 - DNA, 21 bp, Artificial Sequence
  source: /note="Description of Artificial Sequence: Synthetic oligonucleotide"
ctcccaggagcaacaatcgaa

SEQ ID NO: 34030 - DNA, 21 bp, Artificial Sequence
  source: /note="Description of Artificial Sequence: Synthetic oligonucleotide"
ctcccaggaaaagtcacaaca

SEQ ID NO: 34031 - DNA, 21 bp, Artificial Sequence
  source: /note="Description of Artificial Sequence: Synthetic oligonucleotide"
ctcccaggaagagcagcacca

SEQ ID NO: 34032 - DNA, 21 bp, Artificial Sequence
  source: /note="Description of Artificial Sequence: Synthetic oligonucleotide"
ctcccaggaacaccaagagga

SEQ ID NO: 34033 - DNA, 21 bp, Artificial Sequence
  source: /note="Description of Artificial Sequence: Synthetic oligonucleotide"
ctcccaggaacagtcggagtc

SEQ ID NO: 34034 - DNA, 21 bp, Artificial Sequence
  source: /note="Description of Artificial Sequence: Synthetic oligonucleotide"
ctcccaggatggccactcgac

SEQ ID NO: 34035 - DNA, 21 bp, Artificial Sequence
  source: /note="Description of Artificial Sequence: Synthetic oligonucleotide"
ctcccacacccaagccaaaac

SEQ ID NO: 34036 - DNA, 21 bp, Artificial Sequence
  source: /note="Description of Artificial Sequence: Synthetic oligonucleotide"
ctcccacacagaccaaacagc

SEQ ID NO: 34037 - DNA, 21 bp, Artificial Sequence
  source: /note="Description of Artificial Sequence: Synthetic oligonucleotide"
ctcccacacagcacaccaatg

SEQ ID NO: 34038 - DNA, 21 bp, Artificial Sequence
  source: /note="Description of Artificial Sequence: Synthetic oligonucleotide"
ctcccaatcgcaacaagcaaa

SEQ ID NO: 34039 - DNA, 21 bp, Artificial Sequence
  source: /note="Description of Artificial Sequence: Synthetic oligonucleotide"
ctcccaatcggaaaacaagtc

SEQ ID NO: 34040 - DNA, 21 bp, Artificial Sequence
  source: /note="Description of Artificial Sequence: Synthetic oligonucleotide"
ctcccaatcctcacaagccac

SEQ ID NO: 34041 - DNA, 21 bp, Artificial Sequence
  source: /note="Description of Artificial Sequence: Synthetic oligonucleotide"
ctcccaatcctcacaagcagc

SEQ ID NO: 34042 - DNA, 21 bp, Artificial Sequence
  source: /note="Description of Artificial Sequence: Synthetic oligonucleotide"
ctcccaatcaaccacaaattc

SEQ ID NO: 34043 - DNA, 21 bp, Artificial Sequence
  source: /note="Description of Artificial Sequence: Synthetic oligonucleotide"
ctcccaatcccagtcgacgca

SEQ ID NO: 34044 - DNA, 21 bp, Artificial Sequence
  source: /note="Description of Artificial Sequence: Synthetic oligonucleotide"
ctcccaatcagcctccaacca

SEQ ID NO: 34045 - DNA, 21 bp, Artificial Sequence
  source: /note="Description of Artificial Sequence: Synthetic oligonucleotide"
ctcccaatcacatacgcagac

SEQ ID NO: 34046 - DNA, 21 bp, Artificial Sequence
  source: /note="Description of Artificial Sequence: Synthetic oligonucleotide"
ctcccaaaagcaagcacaagc

SEQ ID NO: 34047 - DNA, 21 bp, Artificial Sequence
  source: /note="Description of Artificial Sequence: Synthetic oligonucleotide"
ctcccaaaattcagagaccaa

SEQ ID NO: 34048 - DNA, 21 bp, Artificial Sequence
  source: /note="Description of Artificial Sequence: Synthetic oligonucleotide"
ctcccaaaaatcgacaacaca

SEQ ID NO: 34049 - DNA, 21 bp, Artificial Sequence
  source: /note="Description of Artificial Sequence: Synthetic oligonucleotide"
ctcccaaaaaactacgacgca

SEQ ID NO: 34050 - DNA, 21 bp, Artificial Sequence
  source: /note="Description of Artificial Sequence: Synthetic oligonucleotide"
ctcccaaaaagcagcgacgca

SEQ ID NO: 34051 - DNA, 21 bp, Artificial Sequence
  source: /note="Description of Artificial Sequence: Synthetic oligonucleotide"
ctcccaaaagtcgtcgcaaca

SEQ ID NO: 34052 - DNA, 21 bp, Artificial Sequence
  source: /note="Description of Artificial Sequence: Synthetic oligonucleotide"
ctcccactcgcacaacaacca

SEQ ID NO: 34053 - DNA, 21 bp, Artificial Sequence
  source: /note="Description of Artificial Sequence: Synthetic oligonucleotide"
ctcccactcgcagtctacgac

SEQ ID NO: 34054 - DNA, 21 bp, Artificial Sequence
  source: /note="Description of Artificial Sequence: Synthetic oligonucleotide"
ctcccactcggaaacagaatg

SEQ ID NO: 34055 - DNA, 21 bp, Artificial Sequence
  source: /note="Description of Artificial Sequence: Synthetic oligonucleotide"
ctcccactccacagaagcagc

SEQ ID NO: 34056 - DNA, 21 bp, Artificial Sequence
  source: /note="Description of Artificial Sequence: Synthetic oligonucleotide"
ctcccactccacagcccaaga

SEQ ID NO: 34057 - DNA, 21 bp, Artificial Sequence
  source: /note="Description of Artificial Sequence: Synthetic oligonucleotide"
ctcccactcatcttcacagaa

SEQ ID NO: 34058 - DNA, 21 bp, Artificial Sequence
  source: /note="Description of Artificial Sequence: Synthetic oligonucleotide"
ctcccactcaaaggagcagac

SEQ ID NO: 34059 - DNA, 21 bp, Artificial Sequence
  source: /note="Description of Artificial Sequence: Synthetic oligonucleotide"
ctcccactcatgaaaccagga

SEQ ID NO: 34060 - DNA, 21 bp, Artificial Sequence
  source: /note="Description of Artificial Sequence: Synthetic oligonucleotide"
ctcccactcaacttcgacaga

SEQ ID NO: 34061 - DNA, 21 bp, Artificial Sequence
  source: /note="Description of Artificial Sequence: Synthetic oligonucleotide"
ctcccactcaacaaaagccac

SEQ ID NO: 34062 - DNA, 21 bp, Artificial Sequence
  source: /note="Description of Artificial Sequence: Synthetic oligonucleotide"
ctcccactcaacacatacaca

SEQ ID NO: 34063 - DNA, 21 bp, Artificial Sequence
  source: /note="Description of Artificial Sequence: Synthetic oligonucleotide"
ctcccactcccaccatacgtc

SEQ ID NO: 34064 - DNA, 21 bp, Artificial Sequence
  source: /note="Description of Artificial Sequence: Synthetic oligonucleotide"
ctcccactcccaacaagcgga

SEQ ID NO: 34065 - DNA, 21 bp, Artificial Sequence
  source: /note="Description of Artificial Sequence: Synthetic oligonucleotide"
ctcccactcagagaaccaaaa

SEQ ID NO: 34066 - DNA, 21 bp, Artificial Sequence
  source: /note="Description of Artificial Sequence: Synthetic oligonucleotide"
ctcccactcagaatgagcgac

SEQ ID NO: 34067 - DNA, 21 bp, Artificial Sequence
  source: /note="Description of Artificial Sequence: Synthetic oligonucleotide"
ctcccactcagcccaatgcac

SEQ ID NO: 34068 - DNA, 21 bp, Artificial Sequence
  source: /note="Description of Artificial Sequence: Synthetic oligonucleotide"
ctcccaatggacctcgtcgca

SEQ ID NO: 34069 - DNA, 21 bp, Artificial Sequence
  source: /note="Description of Artificial Sequence: Synthetic oligonucleotide"
ctcccaatgatggcacacctc

SEQ ID NO: 34070 - DNA, 21 bp, Artificial Sequence
  source: /note="Description of Artificial Sequence: Synthetic oligonucleotide"
ctcccaatgagccacctccca

SEQ ID NO: 34071 - DNA, 21 bp, Artificial Sequence
  source: /note="Description of Artificial Sequence: Synthetic oligonucleotide"
ctcccaaacgcatacatgcac

SEQ ID NO: 34072 - DNA, 21 bp, Artificial Sequence
  source: /note="Description of Artificial Sequence: Synthetic oligonucleotide"
ctcccaaacgaaccaagcgac

SEQ ID NO: 34073 - DNA, 21 bp, Artificial Sequence
  source: /note="Description of Artificial Sequence: Synthetic oligonucleotide"
ctcccaaaccacatcagccca

SEQ ID NO: 34074 - DNA, 21 bp, Artificial Sequence
  source: /note="Description of Artificial Sequence: Synthetic oligonucleotide"
ctcccaaacctcagagaccaa

SEQ ID NO: 34075 - DNA, 21 bp, Artificial Sequence
  source: /note="Description of Artificial Sequence: Synthetic oligonucleotide"
ctcccaaacaacagcagagac

SEQ ID NO: 34076 - DNA, 21 bp, Artificial Sequence
  source: /note="Description of Artificial Sequence: Synthetic oligonucleotide"
ctcccaaacccaagaagcgac

SEQ ID NO: 34077 - DNA, 21 bp, Artificial Sequence
  source: /note="Description of Artificial Sequence: Synthetic oligonucleotide"
ctcccaaacagcgtcttcaca

SEQ ID NO: 34078 - DNA, 21 bp, Artificial Sequence
  source: /note="Description of Artificial Sequence: Synthetic oligonucleotide"
ctcccaccagcagcacacaga

SEQ ID NO: 34079 - DNA, 21 bp, Artificial Sequence
  source: /note="Description of Artificial Sequence: Synthetic oligonucleotide"
ctcccaccagcacacgcacac

SEQ ID NO: 34080 - DNA, 21 bp, Artificial Sequence
  source: /note="Description of Artificial Sequence: Synthetic oligonucleotide"
ctcccaccatgcctcacaaac

SEQ ID NO: 34081 - DNA, 21 bp, Artificial Sequence
  source: /note="Description of Artificial Sequence: Synthetic oligonucleotide"
ctcccaccagaacacagagga

SEQ ID NO: 34082 - DNA, 21 bp, Artificial Sequence
  source: /note="Description of Artificial Sequence: Synthetic oligonucleotide"
ctcccaccagaaacattccca

SEQ ID NO: 34083 - DNA, 21 bp, Artificial Sequence
  source: /note="Description of Artificial Sequence: Synthetic oligonucleotide"
ctcccaccaggaccagcaaca

SEQ ID NO: 34084 - DNA, 21 bp, Artificial Sequence
  source: /note="Description of Artificial Sequence: Synthetic oligonucleotide"
ctcccaccacacggaaacgtc

SEQ ID NO: 34085 - DNA, 21 bp, Artificial Sequence
  source: /note="Description of Artificial Sequence: Synthetic oligonucleotide"
ctcccaccacacggaagcgca

SEQ ID NO: 34086 - DNA, 21 bp, Artificial Sequence
  source: /note="Description of Artificial Sequence: Synthetic oligonucleotide"
ctcccaccacacggatacgca

SEQ ID NO: 34087 - DNA, 21 bp, Artificial Sequence
  source: /note="Description of Artificial Sequence: Synthetic oligonucleotide"
ctcccaccactcgtccaatac

SEQ ID NO: 34088 - DNA, 21 bp, Artificial Sequence
  source: /note="Description of Artificial Sequence: Synthetic oligonucleotide"
ctcccaccaaacggacacaga

SEQ ID NO: 34089 - DNA, 21 bp, Artificial Sequence
  source: /note="Description of Artificial Sequence: Synthetic oligonucleotide"
ctcccaccaaacaaattcatg

SEQ ID NO: 34090 - DNA, 21 bp, Artificial Sequence
  source: /note="Description of Artificial Sequence: Synthetic oligonucleotide"
ctcccaccaagagacgacaga

SEQ ID NO: 34091 - DNA, 21 bp, Artificial Sequence
  source: /note="Description of Artificial Sequence: Synthetic oligonucleotide"
ctcccaccaagaagcagctac

SEQ ID NO: 34092 - DNA, 21 bp, Artificial Sequence
  source: /note="Description of Artificial Sequence: Synthetic oligonucleotide"
ctcccaccaagccacgcaatg

SEQ ID NO: 34093 - DNA, 21 bp, Artificial Sequence
  source: /note="Description of Artificial Sequence: Synthetic oligonucleotide"
ctcccaccaagcatcgacaac

SEQ ID NO: 34094 - DNA, 21 bp, Artificial Sequence
  source: /note="Description of Artificial Sequence: Synthetic oligonucleotide"
ctcccaccatacagaggacca

SEQ ID NO: 34095 - DNA, 21 bp, Artificial Sequence
  source: /note="Description of Artificial Sequence: Synthetic oligonucleotide"
ctcccaccatacagcccagca

SEQ ID NO: 34096 - DNA, 21 bp, Artificial Sequence
  source: /note="Description of Artificial Sequence: Synthetic oligonucleotide"
ctcccacaaccaggagcagca

SEQ ID NO: 34097 - DNA, 21 bp, Artificial Sequence
  source: /note="Description of Artificial Sequence: Synthetic oligonucleotide"
ctcccacaaagaacaagccac

SEQ ID NO: 34098 - DNA, 21 bp, Artificial Sequence
  source: /note="Description of Artificial Sequence: Synthetic oligonucleotide"
ctcccaagagaaccactcaca

SEQ ID NO: 34099 - DNA, 21 bp, Artificial Sequence
  source: /note="Description of Artificial Sequence: Synthetic oligonucleotide"
ctcccaagattcccagtcgac

SEQ ID NO: 34100 - DNA, 21 bp, Artificial Sequence
  source: /note="Description of Artificial Sequence: Synthetic oligonucleotide"
ctcccaagaggaatgacaagc

SEQ ID NO: 34101 - DNA, 21 bp, Artificial Sequence
  source: /note="Description of Artificial Sequence: Synthetic oligonucleotide"
ctcccaagacaccaacaaaca

SEQ ID NO: 34102 - DNA, 21 bp, Artificial Sequence
  source: /note="Description of Artificial Sequence: Synthetic oligonucleotide"
ctcccaagaatcccaacagga

SEQ ID NO: 34103 - DNA, 21 bp, Artificial Sequence
  source: /note="Description of Artificial Sequence: Synthetic oligonucleotide"
ctcccaagactcatggcacca

SEQ ID NO: 34104 - DNA, 21 bp, Artificial Sequence
  source: /note="Description of Artificial Sequence: Synthetic oligonucleotide"
ctcccaagacaagcagcactc

SEQ ID NO: 34105 - DNA, 21 bp, Artificial Sequence
  source: /note="Description of Artificial Sequence: Synthetic oligonucleotide"
ctcccaagaagccaattcatc

SEQ ID NO: 34106 - DNA, 21 bp, Artificial Sequence
  source: /note="Description of Artificial Sequence: Synthetic oligonucleotide"
ctcccaagagtcaacgcagga

SEQ ID NO: 34107 - DNA, 21 bp, Artificial Sequence
  source: /note="Description of Artificial Sequence: Synthetic oligonucleotide"
ctcccaagcgcagacagagtc

SEQ ID NO: 34108 - DNA, 21 bp, Artificial Sequence
  source: /note="Description of Artificial Sequence: Synthetic oligonucleotide"
ctcccaagctgcatcggacca

SEQ ID NO: 34109 - DNA, 21 bp, Artificial Sequence
  source: /note="Description of Artificial Sequence: Synthetic oligonucleotide"
ctcccaagcttcaacggaagc

SEQ ID NO: 34110 - DNA, 21 bp, Artificial Sequence
  source: /note="Description of Artificial Sequence: Synthetic oligonucleotide"
ctcccaagcatcctcctccca

SEQ ID NO: 34111 - DNA, 21 bp, Artificial Sequence
  source: /note="Description of Artificial Sequence: Synthetic oligonucleotide"
ctcccaagcatcccaagaaca

SEQ ID NO: 34112 - DNA, 21 bp, Artificial Sequence
  source: /note="Description of Artificial Sequence: Synthetic oligonucleotide"
ctcccaagcatgagcctcagc

SEQ ID NO: 34113 - DNA, 21 bp, Artificial Sequence
  source: /note="Description of Artificial Sequence: Synthetic oligonucleotide"
ctcccaagcaacgcagtcagc

SEQ ID NO: 34114 - DNA, 21 bp, Artificial Sequence
  source: /note="Description of Artificial Sequence: Synthetic oligonucleotide"
ctcccaagcaacacaagactc

SEQ ID NO: 34115 - DNA, 21 bp, Artificial Sequence
  source: /note="Description of Artificial Sequence: Synthetic oligonucleotide"
ctcccaagcccaccaggagtc

SEQ ID NO: 34116 - DNA, 21 bp, Artificial Sequence
  source: /note="Description of Artificial Sequence: Synthetic oligonucleotide"
ctcccaagcccaccaatcagc

SEQ ID NO: 34117 - DNA, 21 bp, Artificial Sequence
  source: /note="Description of Artificial Sequence: Synthetic oligonucleotide"
ctcccaagccaactcatcgga

SEQ ID NO: 34118 - DNA, 21 bp, Artificial Sequence
  source: /note="Description of Artificial Sequence: Synthetic oligonucleotide"
ctcccaagcagagcattcagc

SEQ ID NO: 34119 - DNA, 21 bp, Artificial Sequence
  source: /note="Description of Artificial Sequence: Synthetic oligonucleotide"
ctcccaagcagcacaccaaac

SEQ ID NO: 34120 - DNA, 21 bp, Artificial Sequence
  source: /note="Description of Artificial Sequence: Synthetic oligonucleotide"
ctcccaagcagcgtctacaca

SEQ ID NO: 34121 - DNA, 21 bp, Artificial Sequence
  source: /note="Description of Artificial Sequence: Synthetic oligonucleotide"
ctcccaagcacatgcggaaaa

SEQ ID NO: 34122 - DNA, 21 bp, Artificial Sequence
  source: /note="Description of Artificial Sequence: Synthetic oligonucleotide"
ctcccaagcacaggaggactc

SEQ ID NO: 34123 - DNA, 21 bp, Artificial Sequence
  source: /note="Description of Artificial Sequence: Synthetic oligonucleotide"
ctcccaagcacaccaccaaga

SEQ ID NO: 34124 - DNA, 21 bp, Artificial Sequence
  source: /note="Description of Artificial Sequence: Synthetic oligonucleotide"
ctcccaagctacaacgcaagc

SEQ ID NO: 34125 - DNA, 21 bp, Artificial Sequence
  source: /note="Description of Artificial Sequence: Synthetic oligonucleotide"
ctcccaacacacctcgaagca

SEQ ID NO: 34126 - DNA, 21 bp, Artificial Sequence
  source: /note="Description of Artificial Sequence: Synthetic oligonucleotide"
ctcccaacaatcaacgcagtc

SEQ ID NO: 34127 - DNA, 21 bp, Artificial Sequence
  source: /note="Description of Artificial Sequence: Synthetic oligonucleotide"
ctcccaacaaaagaagcagtc

SEQ ID NO: 34128 - DNA, 21 bp, Artificial Sequence
  source: /note="Description of Artificial Sequence: Synthetic oligonucleotide"
ctcccaacactcagaatccca

SEQ ID NO: 34129 - DNA, 21 bp, Artificial Sequence
  source: /note="Description of Artificial Sequence: Synthetic oligonucleotide"
ctcccaacactcagctacgtc

SEQ ID NO: 34130 - DNA, 21 bp, Artificial Sequence
  source: /note="Description of Artificial Sequence: Synthetic oligonucleotide"
ctcccaacaatgcacaacaca

SEQ ID NO: 34131 - DNA, 21 bp, Artificial Sequence
  source: /note="Description of Artificial Sequence: Synthetic oligonucleotide"
ctcccaacaaacaaaggaatc

SEQ ID NO: 34132 - DNA, 21 bp, Artificial Sequence
  source: /note="Description of Artificial Sequence: Synthetic oligonucleotide"
ctcccaacaaactacgcagca

SEQ ID NO: 34133 - DNA, 21 bp, Artificial Sequence
  source: /note="Description of Artificial Sequence: Synthetic oligonucleotide"
ctcccaacaccattcagcagc

SEQ ID NO: 34134 - DNA, 21 bp, Artificial Sequence
  source: /note="Description of Artificial Sequence: Synthetic oligonucleotide"
ctcccaacaccactcacaagc

SEQ ID NO: 34135 - DNA, 21 bp, Artificial Sequence
  source: /note="Description of Artificial Sequence: Synthetic oligonucleotide"
ctcccaacaagcccaagcgca

SEQ ID NO: 34136 - DNA, 21 bp, Artificial Sequence
  source: /note="Description of Artificial Sequence: Synthetic oligonucleotide"
ctcccaacaagcacaagcatc

SEQ ID NO: 34137 - DNA, 21 bp, Artificial Sequence
  source: /note="Description of Artificial Sequence: Synthetic oligonucleotide"
ctcccaacaagcgtcgtcctc

SEQ ID NO: 34138 - DNA, 21 bp, Artificial Sequence
  source: /note="Description of Artificial Sequence: Synthetic oligonucleotide"
ctcccagtcggagacccactc

SEQ ID NO: 34139 - DNA, 21 bp, Artificial Sequence
  source: /note="Description of Artificial Sequence: Synthetic oligonucleotide"
ctcccagtcaacatcgtcgga

SEQ ID NO: 34140 - DNA, 21 bp, Artificial Sequence
  source: /note="Description of Artificial Sequence: Synthetic oligonucleotide"
ctcccagtcagcgacagatac

SEQ ID NO: 34141 - DNA, 21 bp, Artificial Sequence
  source: /note="Description of Artificial Sequence: Synthetic oligonucleotide"
ctcccagtcagcagcagacac

SEQ ID NO: 34142 - DNA, 21 bp, Artificial Sequence
  source: /note="Description of Artificial Sequence: Synthetic oligonucleotide"
ctcccagtcagcacaagacac

SEQ ID NO: 34143 - DNA, 21 bp, Artificial Sequence
  source: /note="Description of Artificial Sequence: Synthetic oligonucleotide"
ctcccagtcgtcaacgcaagc

SEQ ID NO: 34144 - DNA, 21 bp, Artificial Sequence
  source: /note="Description of Artificial Sequence: Synthetic oligonucleotide"
ctcccatacacagtcggaaca

SEQ ID NO: 34145 - DNA, 21 bp, Artificial Sequence
  source: /note="Description of Artificial Sequence: Synthetic oligonucleotide"
ctccaagcaagaacactcaac

SEQ ID NO: 34146 - DNA, 21 bp, Artificial Sequence
  source: /note="Description of Artificial Sequence: Synthetic oligonucleotide"
ctccaagcaagcaaagcagac

SEQ ID NO: 34147 - DNA, 21 bp, Artificial Sequence
  source: /note="Description of Artificial Sequence: Synthetic oligonucleotide"
ctccaagcaagcaacgacatc

SEQ ID NO: 34148 - DNA, 21 bp, Artificial Sequence
  source: /note="Description of Artificial Sequence: Synthetic oligonucleotide"
ctccaagcaacaagaggagca

SEQ ID NO: 34149 - DNA, 21 bp, Artificial Sequence
  source: /note="Description of Artificial Sequence: Synthetic oligonucleotide"
ctccaagacgcagtctgcaac

SEQ ID NO: 34150 - DNA, 21 bp, Artificial Sequence
  source: /note="Description of Artificial Sequence: Synthetic oligonucleotide"
ctccaagacccaagaagccca

SEQ ID NO: 34151 - DNA, 21 bp, Artificial Sequence
  source: /note="Description of Artificial Sequence: Synthetic oligonucleotide"
ctccaagacgtcagcatggga

SEQ ID NO: 34152 - DNA, 21 bp, Artificial Sequence
  source: /note="Description of Artificial Sequence: Synthetic oligonucleotide"
ctccaagaaaaaagctgggaa

SEQ ID NO: 34153 - DNA, 21 bp, Artificial Sequence
  source: /note="Description of Artificial Sequence: Synthetic oligonucleotide"
ctccaagaaccaggaaacctc

SEQ ID NO: 34154 - DNA, 21 bp, Artificial Sequence
  source: /note="Description of Artificial Sequence: Synthetic oligonucleotide"
ctccaattcagcccaccaagc

SEQ ID NO: 34155 - DNA, 21 bp, Artificial Sequence
  source: /note="Description of Artificial Sequence: Synthetic oligonucleotide"
ctccaaggagcattcgcaagc

SEQ ID NO: 34156 - DNA, 21 bp, Artificial Sequence
  source: /note="Description of Artificial Sequence: Synthetic oligonucleotide"
ctccaaggaagcagacaaatc

SEQ ID NO: 34157 - DNA, 21 bp, Artificial Sequence
  source: /note="Description of Artificial Sequence: Synthetic oligonucleotide"
ctccaaggatggcacgcacaa

SEQ ID NO: 34158 - DNA, 21 bp, Artificial Sequence
  source: /note="Description of Artificial Sequence: Synthetic oligonucleotide"
ctccaacaccacagcaacgga

SEQ ID NO: 34159 - DNA, 21 bp, Artificial Sequence
  source: /note="Description of Artificial Sequence: Synthetic oligonucleotide"
ctccaacacctccaaccaagc

SEQ ID NO: 34160 - DNA, 21 bp, Artificial Sequence
  source: /note="Description of Artificial Sequence: Synthetic oligonucleotide"
ctccaaaaaatggtcccactc

SEQ ID NO: 34161 - DNA, 21 bp, Artificial Sequence
  source: /note="Description of Artificial Sequence: Synthetic oligonucleotide"
ctccaaaaaccaacaatgagc

SEQ ID NO: 34162 - DNA, 21 bp, Artificial Sequence
  source: /note="Description of Artificial Sequence: Synthetic oligonucleotide"
ctccaaaaaccaacaagcgca

SEQ ID NO: 34163 - DNA, 21 bp, Artificial Sequence
  source: /note="Description of Artificial Sequence: Synthetic oligonucleotide"
ctccaactcaaccaacaaaaa

SEQ ID NO: 34164 - DNA, 21 bp, Artificial Sequence
  source: /note="Description of Artificial Sequence: Synthetic oligonucleotide"
ctccaactcagacaaacaagc

SEQ ID NO: 34165 - DNA, 21 bp, Artificial Sequence
  source: /note="Description of Artificial Sequence: Synthetic oligonucleotide"
ctccaactcacaagaggagaa

SEQ ID NO: 34166 - DNA, 21 bp, Artificial Sequence
  source: /note="Description of Artificial Sequence: Synthetic oligonucleotide"
ctccaaatggcaagaggagga

SEQ ID NO: 34167 - DNA, 21 bp, Artificial Sequence
  source: /note="Description of Artificial Sequence: Synthetic oligonucleotide"
ctccaaatgagaccaatgaca

SEQ ID NO: 34168 - DNA, 21 bp, Artificial Sequence
  source: /note="Description of Artificial Sequence: Synthetic oligonucleotide"
ctccaaaacggatgcaaaagc

SEQ ID NO: 34169 - DNA, 21 bp, Artificial Sequence
  source: /note="Description of Artificial Sequence: Synthetic oligonucleotide"
ctccaaaacacaagcagcagc

SEQ ID NO: 34170 - DNA, 21 bp, Artificial Sequence
  source: /note="Description of Artificial Sequence: Synthetic oligonucleotide"
ctccaaccattcaaacaccaa

SEQ ID NO: 34171 - DNA, 21 bp, Artificial Sequence
  source: /note="Description of Artificial Sequence: Synthetic oligonucleotide"
ctccaaccaagagaaccagtc

SEQ ID NO: 34172 - DNA, 21 bp, Artificial Sequence
  source: /note="Description of Artificial Sequence: Synthetic oligonucleotide"
ctccaaccaagcagcagaaca

SEQ ID NO: 34173 - DNA, 21 bp, Artificial Sequence
  source: /note="Description of Artificial Sequence: Synthetic oligonucleotide"
ctccaaccaacaggagaagca

SEQ ID NO: 34174 - DNA, 21 bp, Artificial Sequence
  source: /note="Description of Artificial Sequence: Synthetic oligonucleotide"
ctccaacaaacaggactcaga

SEQ ID NO: 34175 - DNA, 21 bp, Artificial Sequence
  source: /note="Description of Artificial Sequence: Synthetic oligonucleotide"
ctccaaagagcaaacatggtc

SEQ ID NO: 34176 - DNA, 21 bp, Artificial Sequence
  source: /note="Description of Artificial Sequence: Synthetic oligonucleotide"
ctccaaagagaagcacacaca

SEQ ID NO: 34177 - DNA, 21 bp, Artificial Sequence
  source: /note="Description of Artificial Sequence: Synthetic oligonucleotide"
ctccaaagaagcagaggacca

SEQ ID NO: 34178 - DNA, 21 bp, Artificial Sequence
  source: /note="Description of Artificial Sequence: Synthetic oligonucleotide"
ctccaaagcgcaagagcacca

SEQ ID NO: 34179 - DNA, 21 bp, Artificial Sequence
  source: /note="Description of Artificial Sequence: Synthetic oligonucleotide"
ctccaaagcttcagcagccca

SEQ ID NO: 34180 - DNA, 21 bp, Artificial Sequence
  source: /note="Description of Artificial Sequence: Synthetic oligonucleotide"
ctccaaagcggaccacaacca

SEQ ID NO: 34181 - DNA, 21 bp, Artificial Sequence
  source: /note="Description of Artificial Sequence: Synthetic oligonucleotide"
ctccaaagcccagaaaacgaa

SEQ ID NO: 34182 - DNA, 21 bp, Artificial Sequence
  source: /note="Description of Artificial Sequence: Synthetic oligonucleotide"
ctccaaagctacacaccacca

SEQ ID NO: 34183 - DNA, 21 bp, Artificial Sequence
  source: /note="Description of Artificial Sequence: Synthetic oligonucleotide"
ctccaaacaggaagattcagc

SEQ ID NO: 34184 - DNA, 21 bp, Artificial Sequence
  source: /note="Description of Artificial Sequence: Synthetic oligonucleotide"
ctccaaacaaaaagcagcagc

SEQ ID NO: 34185 - DNA, 21 bp, Artificial Sequence
  source: /note="Description of Artificial Sequence: Synthetic oligonucleotide"
ctccaaacagtcgacatcgac

SEQ ID NO: 34186 - DNA, 21 bp, Artificial Sequence
  source: /note="Description of Artificial Sequence: Synthetic oligonucleotide"
ctccaagtcgacagcaacgtc

SEQ ID NO: 34187 - DNA, 21 bp, Artificial Sequence
  source: /note="Description of Artificial Sequence: Synthetic oligonucleotide"
ctccaagtcccaagcagcctc

SEQ ID NO: 34188 - DNA, 21 bp, Artificial Sequence
  source: /note="Description of Artificial Sequence: Synthetic oligonucleotide"
ctccaagtcagcggactcgac

SEQ ID NO: 34189 - DNA, 21 bp, Artificial Sequence
  source: /note="Description of Artificial Sequence: Synthetic oligonucleotide"
ctccaatacgcaacaagcgac

SEQ ID NO: 34190 - DNA, 21 bp, Artificial Sequence
  source: /note="Description of Artificial Sequence: Synthetic oligonucleotide"
ctcagagcagcagaaatcagc

SEQ ID NO: 34191 - DNA, 21 bp, Artificial Sequence
  source: /note="Description of Artificial Sequence: Synthetic oligonucleotide"
ctcagagcagcaaacgcactc

SEQ ID NO: 34192 - DNA, 21 bp, Artificial Sequence
  source: /note="Description of Artificial Sequence: Synthetic oligonucleotide"
ctcagagcagacggaaaagca

SEQ ID NO: 34193 - DNA, 21 bp, Artificial Sequence
  source: /note="Description of Artificial Sequence: Synthetic oligonucleotide"
ctcagagcaggaacagcacaa

SEQ ID NO: 34194 - DNA, 21 bp, Artificial Sequence
  source: /note="Description of Artificial Sequence: Synthetic oligonucleotide"
ctcagagcaggaacaagcagc

SEQ ID NO: 34195 - DNA, 21 bp, Artificial Sequence
  source: /note="Description of Artificial Sequence: Synthetic oligonucleotide"
ctcagagcaatcctcgaagaa

SEQ ID NO: 34196 - DNA, 21 bp, Artificial Sequence
  source: /note="Description of Artificial Sequence: Synthetic oligonucleotide"
ctcagagcactcacaggaagc

SEQ ID NO: 34197 - DNA, 21 bp, Artificial Sequence
  source: /note="Description of Artificial Sequence: Synthetic oligonucleotide"
ctcagagcacaaaacgacgca

SEQ ID NO: 34198 - DNA, 21 bp, Artificial Sequence
  source: /note="Description of Artificial Sequence: Synthetic oligonucleotide"
ctcagagcaacaaacagcctc

SEQ ID NO: 34199 - DNA, 21 bp, Artificial Sequence
  source: /note="Description of Artificial Sequence: Synthetic oligonucleotide"
ctcagagacggacaaagacca

SEQ ID NO: 34200 - DNA, 21 bp, Artificial Sequence
  source: /note="Description of Artificial Sequence: Synthetic oligonucleotide"
ctcagagacggaagagcaagc

SEQ ID NO: 34201 - DNA, 21 bp, Artificial Sequence
  source: /note="Description of Artificial Sequence: Synthetic oligonucleotide"
ctcagagaccacggaggacac

SEQ ID NO: 34202 - DNA, 21 bp, Artificial Sequence
  source: /note="Description of Artificial Sequence: Synthetic oligonucleotide"
ctcagagacagagacttcaaa

SEQ ID NO: 34203 - DNA, 21 bp, Artificial Sequence
  source: /note="Description of Artificial Sequence: Synthetic oligonucleotide"
ctcagagacagagacgtcctc

SEQ ID NO: 34204 - DNA, 21 bp, Artificial Sequence
  source: /note="Description of Artificial Sequence: Synthetic oligonucleotide"
ctcagagacagcaacaaaaac

SEQ ID NO: 34205 - DNA, 21 bp, Artificial Sequence
  source: /note="Description of Artificial Sequence: Synthetic oligonucleotide"
ctcagagacagcgtccaagtc

SEQ ID NO: 34206 - DNA, 21 bp, Artificial Sequence
  source: /note="Description of Artificial Sequence: Synthetic oligonucleotide"
ctcagagaacacggaccagtc

SEQ ID NO: 34207 - DNA, 21 bp, Artificial Sequence
  source: /note="Description of Artificial Sequence: Synthetic oligonucleotide"
ctcagagaaatgccactccca

SEQ ID NO: 34208 - DNA, 21 bp, Artificial Sequence
  source: /note="Description of Artificial Sequence: Synthetic oligonucleotide"
ctcagagaaaacatgagcaac

SEQ ID NO: 34209 - DNA, 21 bp, Artificial Sequence
  source: /note="Description of Artificial Sequence: Synthetic oligonucleotide"
ctcagagaaccaacaggattc

SEQ ID NO: 34210 - DNA, 21 bp, Artificial Sequence
  source: /note="Description of Artificial Sequence: Synthetic oligonucleotide"
ctcagagaaccagtcatccaa

SEQ ID NO: 34211 - DNA, 21 bp, Artificial Sequence
  source: /note="Description of Artificial Sequence: Synthetic oligonucleotide"
ctcagagaaagccaaagaatc

SEQ ID NO: 34212 - DNA, 21 bp, Artificial Sequence
  source: /note="Description of Artificial Sequence: Synthetic oligonucleotide"
ctcagattcccaggaacacca

SEQ ID NO: 34213 - DNA, 21 bp, Artificial Sequence
  source: /note="Description of Artificial Sequence: Synthetic oligonucleotide"
ctcagattccaaagcacacca

SEQ ID NO: 34214 - DNA, 21 bp, Artificial Sequence
  source: /note="Description of Artificial Sequence: Synthetic oligonucleotide"
ctcagaggagcaatcgcacca

SEQ ID NO: 34215 - DNA, 21 bp, Artificial Sequence
  source: /note="Description of Artificial Sequence: Synthetic oligonucleotide"
ctcagaggagacgcaagcgaa

SEQ ID NO: 34216 - DNA, 21 bp, Artificial Sequence
  source: /note="Description of Artificial Sequence: Synthetic oligonucleotide"
ctcagaggagaaagcagccca

SEQ ID NO: 34217 - DNA, 21 bp, Artificial Sequence
  source: /note="Description of Artificial Sequence: Synthetic oligonucleotide"
ctcagaggaggaatggaccca

SEQ ID NO: 34218 - DNA, 21 bp, Artificial Sequence
  source: /note="Description of Artificial Sequence: Synthetic oligonucleotide"
ctcagaggaaacgtcgaagca

SEQ ID NO: 34219 - DNA, 21 bp, Artificial Sequence
  source: /note="Description of Artificial Sequence: Synthetic oligonucleotide"
ctcagaggaccaacaacagtc

SEQ ID NO: 34220 - DNA, 21 bp, Artificial Sequence
  source: /note="Description of Artificial Sequence: Synthetic oligonucleotide"
ctcagaggacaactcagcaac

SEQ ID NO: 34221 - DNA, 21 bp, Artificial Sequence
  source: /note="Description of Artificial Sequence: Synthetic oligonucleotide"
ctcagaggaagaagcagcgaa

SEQ ID NO: 34222 - DNA, 21 bp, Artificial Sequence
  source: /note="Description of Artificial Sequence: Synthetic oligonucleotide"
ctcagaggaagcctcgaacac

SEQ ID NO: 34223 - DNA, 21 bp, Artificial Sequence
  source: /note="Description of Artificial Sequence: Synthetic oligonucleotide"
ctcagaggaacaatggaaagc

SEQ ID NO: 34224 - DNA, 21 bp, Artificial Sequence
  source: /note="Description of Artificial Sequence: Synthetic oligonucleotide"
ctcagacacgacagcaacgca

SEQ ID NO: 34225 - DNA, 21 bp, Artificial Sequence
  source: /note="Description of Artificial Sequence: Synthetic oligonucleotide"
ctcagaatcagcacaagcgac

SEQ ID NO: 34226 - DNA, 21 bp, Artificial Sequence
  source: /note="Description of Artificial Sequence: Synthetic oligonucleotide"
ctcagaaaagaatacctcgga

SEQ ID NO: 34227 - DNA, 21 bp, Artificial Sequence
  source: /note="Description of Artificial Sequence: Synthetic oligonucleotide"
ctcagactcgacgaccaagca

SEQ ID NO: 34228 - DNA, 21 bp, Artificial Sequence
  source: /note="Description of Artificial Sequence: Synthetic oligonucleotide"
ctcagactccaccaagaaagc

SEQ ID NO: 34229 - DNA, 21 bp, Artificial Sequence
  source: /note="Description of Artificial Sequence: Synthetic oligonucleotide"
ctcagactcaaaaacgacgca

SEQ ID NO: 34230 - DNA, 21 bp, Artificial Sequence
  source: /note="Description of Artificial Sequence: Synthetic oligonucleotide"
ctcagactcccaccagcagaa

SEQ ID NO: 34231 - DNA, 21 bp, Artificial Sequence
  source: /note="Description of Artificial Sequence: Synthetic oligonucleotide"
ctcagactcagcgacaacaga

SEQ ID NO: 34232 - DNA, 21 bp, Artificial Sequence
  source: /note="Description of Artificial Sequence: Synthetic oligonucleotide"
ctcagactcacaggaagacca

SEQ ID NO: 34233 - DNA, 21 bp, Artificial Sequence
  source: /note="Description of Artificial Sequence: Synthetic oligonucleotide"
ctcagactcgtcagagaacca

SEQ ID NO: 34234 - DNA, 21 bp, Artificial Sequence
  source: /note="Description of Artificial Sequence: Synthetic oligonucleotide"
ctcagaaacgcagcaagcgtc

SEQ ID NO: 34235 - DNA, 21 bp, Artificial Sequence
  source: /note="Description of Artificial Sequence: Synthetic oligonucleotide"
ctcagaaacgcagacggagca

SEQ ID NO: 34236 - DNA, 21 bp, Artificial Sequence
  source: /note="Description of Artificial Sequence: Synthetic oligonucleotide"
ctcagaaacctcaacagctac

SEQ ID NO: 34237 - DNA, 21 bp, Artificial Sequence
  source: /note="Description of Artificial Sequence: Synthetic oligonucleotide"
ctcagaaacaacccactcgca

SEQ ID NO: 34238 - DNA, 21 bp, Artificial Sequence
  source: /note="Description of Artificial Sequence: Synthetic oligonucleotide"
ctcagaaacagaccaagcgaa

SEQ ID NO: 34239 - DNA, 21 bp, Artificial Sequence
  source: /note="Description of Artificial Sequence: Synthetic oligonucleotide"
ctcagaaacagcagcgtcgtc

SEQ ID NO: 34240 - DNA, 21 bp, Artificial Sequence
  source: /note="Description of Artificial Sequence: Synthetic oligonucleotide"
ctcagaaacacaccaatgagc

SEQ ID NO: 34241 - DNA, 21 bp, Artificial Sequence
  source: /note="Description of Artificial Sequence: Synthetic oligonucleotide"
ctcagaaacacagtcctcgga

SEQ ID NO: 34242 - DNA, 21 bp, Artificial Sequence
  source: /note="Description of Artificial Sequence: Synthetic oligonucleotide"
ctcagaaacgtcgcagaacac

SEQ ID NO: 34243 - DNA, 21 bp, Artificial Sequence
  source: /note="Description of Artificial Sequence: Synthetic oligonucleotide"
ctcagaccaaacggatacaca

SEQ ID NO: 34244 - DNA, 21 bp, Artificial Sequence
  source: /note="Description of Artificial Sequence: Synthetic oligonucleotide"
ctcagaccaccagcattccca

SEQ ID NO: 34245 - DNA, 21 bp, Artificial Sequence
  source: /note="Description of Artificial Sequence: Synthetic oligonucleotide"
ctcagaccaccagcaggactc

SEQ ID NO: 34246 - DNA, 21 bp, Artificial Sequence
  source: /note="Description of Artificial Sequence: Synthetic oligonucleotide"
ctcagaccaccacaaaacaac

SEQ ID NO: 34247 - DNA, 21 bp, Artificial Sequence
  source: /note="Description of Artificial Sequence: Synthetic oligonucleotide"
ctcagaccaagaccaagcgac

SEQ ID NO: 34248 - DNA, 21 bp, Artificial Sequence
  source: /note="Description of Artificial Sequence: Synthetic oligonucleotide"
ctcagaccaagcttcagccca

SEQ ID NO: 34249 - DNA, 21 bp, Artificial Sequence
  source: /note="Description of Artificial Sequence: Synthetic oligonucleotide"
ctcagaccaagcagcatcagc

SEQ ID NO: 34250 - DNA, 21 bp, Artificial Sequence
  source: /note="Description of Artificial Sequence: Synthetic oligonucleotide"
ctcagaccaagcagccaaaca

SEQ ID NO: 34251 - DNA, 21 bp, Artificial Sequence
  source: /note="Description of Artificial Sequence: Synthetic oligonucleotide"
ctcagaccaagcgtcagagaa

SEQ ID NO: 34252 - DNA, 21 bp, Artificial Sequence
  source: /note="Description of Artificial Sequence: Synthetic oligonucleotide"
ctcagaccaacaacaatgcca

SEQ ID NO: 34253 - DNA, 21 bp, Artificial Sequence
  source: /note="Description of Artificial Sequence: Synthetic oligonucleotide"
ctcagacaaggatacagccaa

SEQ ID NO: 34254 - DNA, 21 bp, Artificial Sequence
  source: /note="Description of Artificial Sequence: Synthetic oligonucleotide"
ctcagacaaagcacaccacca

SEQ ID NO: 34255 - DNA, 21 bp, Artificial Sequence
  source: /note="Description of Artificial Sequence: Synthetic oligonucleotide"
ctcagaagaccagaagaactc

SEQ ID NO: 34256 - DNA, 21 bp, Artificial Sequence
  source: /note="Description of Artificial Sequence: Synthetic oligonucleotide"
ctcagaagcgacacaaaatac

SEQ ID NO: 34257 - DNA, 21 bp, Artificial Sequence
  source: /note="Description of Artificial Sequence: Synthetic oligonucleotide"
ctcagaagcgacgtccaattc

SEQ ID NO: 34258 - DNA, 21 bp, Artificial Sequence
  source: /note="Description of Artificial Sequence: Synthetic oligonucleotide"
ctcagaagcgactgggtcgaa

SEQ ID NO: 34259 - DNA, 21 bp, Artificial Sequence
  source: /note="Description of Artificial Sequence: Synthetic oligonucleotide"
ctcagaagcgaaagctgcgca

SEQ ID NO: 34260 - DNA, 21 bp, Artificial Sequence
  source: /note="Description of Artificial Sequence: Synthetic oligonucleotide"
ctcagaagcggagcaatccaa

SEQ ID NO: 34261 - DNA, 21 bp, Artificial Sequence
  source: /note="Description of Artificial Sequence: Synthetic oligonucleotide"
ctcagaagcggaacactcgca

SEQ ID NO: 34262 - DNA, 21 bp, Artificial Sequence
  source: /note="Description of Artificial Sequence: Synthetic oligonucleotide"
ctcagaagcctcacagacgca

SEQ ID NO: 34263 - DNA, 21 bp, Artificial Sequence
  source: /note="Description of Artificial Sequence: Synthetic oligonucleotide"
ctcagaagcatgcaaacacca

SEQ ID NO: 34264 - DNA, 21 bp, Artificial Sequence
  source: /note="Description of Artificial Sequence: Synthetic oligonucleotide"
ctcagaagcccacacttcgac

SEQ ID NO: 34265 - DNA, 21 bp, Artificial Sequence
  source: /note="Description of Artificial Sequence: Synthetic oligonucleotide"
ctcagaagcccactcagccca

SEQ ID NO: 34266 - DNA, 21 bp, Artificial Sequence
  source: /note="Description of Artificial Sequence: Synthetic oligonucleotide"
ctcagaagcccaccaacagca

SEQ ID NO: 34267 - DNA, 21 bp, Artificial Sequence
  source: /note="Description of Artificial Sequence: Synthetic oligonucleotide"
ctcagaagccaagaaagacac

SEQ ID NO: 34268 - DNA, 21 bp, Artificial Sequence
  source: /note="Description of Artificial Sequence: Synthetic oligonucleotide"
ctcagaagccaaggaccactc

SEQ ID NO: 34269 - DNA, 21 bp, Artificial Sequence
  source: /note="Description of Artificial Sequence: Synthetic oligonucleotide"
ctcagaagcagcctcgactgg

SEQ ID NO: 34270 - DNA, 21 bp, Artificial Sequence
  source: /note="Description of Artificial Sequence: Synthetic oligonucleotide"
ctcagaagcagcagcccagga

SEQ ID NO: 34271 - DNA, 21 bp, Artificial Sequence
  source: /note="Description of Artificial Sequence: Synthetic oligonucleotide"
ctcagaagcagcacaacacca

SEQ ID NO: 34272 - DNA, 21 bp, Artificial Sequence
  source: /note="Description of Artificial Sequence: Synthetic oligonucleotide"
ctcagaagcacaagcgcatac

SEQ ID NO: 34273 - DNA, 21 bp, Artificial Sequence
  source: /note="Description of Artificial Sequence: Synthetic oligonucleotide"
ctcagaagcgtcaacgacagc

SEQ ID NO: 34274 - DNA, 21 bp, Artificial Sequence
  source: /note="Description of Artificial Sequence: Synthetic oligonucleotide"
ctcagaacagcagacgtcgca

SEQ ID NO: 34275 - DNA, 21 bp, Artificial Sequence
  source: /note="Description of Artificial Sequence: Synthetic oligonucleotide"
ctcagaacagcaagcccacca

SEQ ID NO: 34276 - DNA, 21 bp, Artificial Sequence
  source: /note="Description of Artificial Sequence: Synthetic oligonucleotide"
ctcagaacagcaagcagcaca

SEQ ID NO: 34277 - DNA, 21 bp, Artificial Sequence
  source: /note="Description of Artificial Sequence: Synthetic oligonucleotide"
ctcagaacagacatcctcagc

SEQ ID NO: 34278 - DNA, 21 bp, Artificial Sequence
  source: /note="Description of Artificial Sequence: Synthetic oligonucleotide"
ctcagaacaggatacctcgac

SEQ ID NO: 34279 - DNA, 21 bp, Artificial Sequence
  source: /note="Description of Artificial Sequence: Synthetic oligonucleotide"
ctcagaacactcaacgcagca

SEQ ID NO: 34280 - DNA, 21 bp, Artificial Sequence
  source: /note="Description of Artificial Sequence: Synthetic oligonucleotide"
ctcagaacaaacgacagccaa

SEQ ID NO: 34281 - DNA, 21 bp, Artificial Sequence
  source: /note="Description of Artificial Sequence: Synthetic oligonucleotide"
ctcagaacaccagaaagactc

SEQ ID NO: 34282 - DNA, 21 bp, Artificial Sequence
  source: /note="Description of Artificial Sequence: Synthetic oligonucleotide"
ctcagaacaccaaacggacca

SEQ ID NO: 34283 - DNA, 21 bp, Artificial Sequence
  source: /note="Description of Artificial Sequence: Synthetic oligonucleotide"
ctcagaacaagagaagcagga

SEQ ID NO: 34284 - DNA, 21 bp, Artificial Sequence
  source: /note="Description of Artificial Sequence: Synthetic oligonucleotide"
ctcagaacaagccaagacaga

SEQ ID NO: 34285 - DNA, 21 bp, Artificial Sequence
  source: /note="Description of Artificial Sequence: Synthetic oligonucleotide"
ctcagaacaacactcccactc

SEQ ID NO: 34286 - DNA, 21 bp, Artificial Sequence
  source: /note="Description of Artificial Sequence: Synthetic oligonucleotide"
ctcagaacagtcaacagcgca

SEQ ID NO: 34287 - DNA, 21 bp, Artificial Sequence
  source: /note="Description of Artificial Sequence: Synthetic oligonucleotide"
ctcagagtcgacctcctccaa

SEQ ID NO: 34288 - DNA, 21 bp, Artificial Sequence
  source: /note="Description of Artificial Sequence: Synthetic oligonucleotide"
ctcagagtcgacagcccagtc

SEQ ID NO: 34289 - DNA, 21 bp, Artificial Sequence
  source: /note="Description of Artificial Sequence: Synthetic oligonucleotide"
ctcagagtcgacgtcgcaaca

SEQ ID NO: 34290 - DNA, 21 bp, Artificial Sequence
  source: /note="Description of Artificial Sequence: Synthetic oligonucleotide"
ctcagagtcggaggaagctac

SEQ ID NO: 34291 - DNA, 21 bp, Artificial Sequence
  source: /note="Description of Artificial Sequence: Synthetic oligonucleotide"
ctcagagtcggaacagaacaa

SEQ ID NO: 34292 - DNA, 21 bp, Artificial Sequence
  source: /note="Description of Artificial Sequence: Synthetic oligonucleotide"
ctcagagtcctcgacgcaagc

SEQ ID NO: 34293 - DNA, 21 bp, Artificial Sequence
  source: /note="Description of Artificial Sequence: Synthetic oligonucleotide"
ctcagagtcaacccaatggtc

SEQ ID NO: 34294 - DNA, 21 bp, Artificial Sequence
  source: /note="Description of Artificial Sequence: Synthetic oligonucleotide"
ctcagagtcaacgtcgaagtc

SEQ ID NO: 34295 - DNA, 21 bp, Artificial Sequence
  source: /note="Description of Artificial Sequence: Synthetic oligonucleotide"
ctcagagtcccaccaatgagc

SEQ ID NO: 34296 - DNA, 21 bp, Artificial Sequence
  source: /note="Description of Artificial Sequence: Synthetic oligonucleotide"
ctcagagtcccaccaaacaac

SEQ ID NO: 34297 - DNA, 21 bp, Artificial Sequence
  source: /note="Description of Artificial Sequence: Synthetic oligonucleotide"
ctcagagtcacaagccaccca

SEQ ID NO: 34298 - DNA, 21 bp, Artificial Sequence
  source: /note="Description of Artificial Sequence: Synthetic oligonucleotide"
ctcagcgcagcaccaagcaac

SEQ ID NO: 34299 - DNA, 21 bp, Artificial Sequence
  source: /note="Description of Artificial Sequence: Synthetic oligonucleotide"
ctcagcgcagcaacaacaaaa

SEQ ID NO: 34300 - DNA, 21 bp, Artificial Sequence
  source: /note="Description of Artificial Sequence: Synthetic oligonucleotide"
ctcagcgcattcgtcaaagaa

SEQ ID NO: 34301 - DNA, 21 bp, Artificial Sequence
  source: /note="Description of Artificial Sequence: Synthetic oligonucleotide"
ctcagcgcaggagcaagagca

SEQ ID NO: 34302 - DNA, 21 bp, Artificial Sequence
  source: /note="Description of Artificial Sequence: Synthetic oligonucleotide"
ctcagcgcactcaacgtcaaa

SEQ ID NO: 34303 - DNA, 21 bp, Artificial Sequence
  source: /note="Description of Artificial Sequence: Synthetic oligonucleotide"
ctcagcgcacaaagaggagca

SEQ ID NO: 34304 - DNA, 21 bp, Artificial Sequence
  source: /note="Description of Artificial Sequence: Synthetic oligonucleotide"
ctcagcgcaagacacatgcca

SEQ ID NO: 34305 - DNA, 21 bp, Artificial Sequence
  source: /note="Description of Artificial Sequence: Synthetic oligonucleotide"
ctcagcgcaagaccagacctc

SEQ ID NO: 34306 - DNA, 21 bp, Artificial Sequence
  source: /note="Description of Artificial Sequence: Synthetic oligonucleotide"
ctcagcgcaagaccacacctc

SEQ ID NO: 34307 - DNA, 21 bp, Artificial Sequence
  source: /note="Description of Artificial Sequence: Synthetic oligonucleotide"
ctcagcgcaagcgcaaacagc

SEQ ID NO: 34308 - DNA, 21 bp, Artificial Sequence
  source: /note="Description of Artificial Sequence: Synthetic oligonucleotide"
ctcagcgcaagccacgtcgtc

SEQ ID NO: 34309 - DNA, 21 bp, Artificial Sequence
  source: /note="Description of Artificial Sequence: Synthetic oligonucleotide"
ctcagcgcaagctggacaagc

SEQ ID NO: 34310 - DNA, 21 bp, Artificial Sequence
  source: /note="Description of Artificial Sequence: Synthetic oligonucleotide"
ctcagcgcatacgcacaagga

SEQ ID NO: 34311 - DNA, 21 bp, Artificial Sequence
  source: /note="Description of Artificial Sequence: Synthetic oligonucleotide"
ctcagctgcggaagcatggaa

SEQ ID NO: 34312 - DNA, 21 bp, Artificial Sequence
  source: /note="Description of Artificial Sequence: Synthetic oligonucleotide"
ctcagcgacgcacacagctgg

SEQ ID NO: 34313 - DNA, 21 bp, Artificial Sequence
  source: /note="Description of Artificial Sequence: Synthetic oligonucleotide"
ctcagcgacgcagtcgcagaa

SEQ ID NO: 34314 - DNA, 21 bp, Artificial Sequence
  source: /note="Description of Artificial Sequence: Synthetic oligonucleotide"
ctcagcgacgaaagaacacac

SEQ ID NO: 34315 - DNA, 21 bp, Artificial Sequence
  source: /note="Description of Artificial Sequence: Synthetic oligonucleotide"
ctcagcgacttccaaaaccca

SEQ ID NO: 34316 - DNA, 21 bp, Artificial Sequence
  source: /note="Description of Artificial Sequence: Synthetic oligonucleotide"
ctcagcgaccaccacggactc

SEQ ID NO: 34317 - DNA, 21 bp, Artificial Sequence
  source: /note="Description of Artificial Sequence: Synthetic oligonucleotide"
ctcagcgacaaaggacaccca

SEQ ID NO: 34318 - DNA, 21 bp, Artificial Sequence
  source: /note="Description of Artificial Sequence: Synthetic oligonucleotide"
ctcagcgacctccaaggaaac

SEQ ID NO: 34319 - DNA, 21 bp, Artificial Sequence
  source: /note="Description of Artificial Sequence: Synthetic oligonucleotide"
ctcagcgacctcacaagctgg

SEQ ID NO: 34320 - DNA, 21 bp, Artificial Sequence
  source: /note="Description of Artificial Sequence: Synthetic oligonucleotide"
ctcagcgacccaacagaaatc

SEQ ID NO: 34321 - DNA, 21 bp, Artificial Sequence
  source: /note="Description of Artificial Sequence: Synthetic oligonucleotide"
ctcagcgacagaagcgtcctc

SEQ ID NO: 34322 - DNA, 21 bp, Artificial Sequence
  source: /note="Description of Artificial Sequence: Synthetic oligonucleotide"
ctcagcgaagcaccagtccac

SEQ ID NO: 34323 - DNA, 21 bp, Artificial Sequence
  source: /note="Description of Artificial Sequence: Synthetic oligonucleotide"
ctcagcgaattcagcagagca

SEQ ID NO: 34324 - DNA, 21 bp, Artificial Sequence
  source: /note="Description of Artificial Sequence: Synthetic oligonucleotide"
ctcagcgaaggatgcatcctc

SEQ ID NO: 34325 - DNA, 21 bp, Artificial Sequence
  source: /note="Description of Artificial Sequence: Synthetic oligonucleotide"
ctcagcgaaggactccaaaaa

SEQ ID NO: 34326 - DNA, 21 bp, Artificial Sequence
  source: /note="Description of Artificial Sequence: Synthetic oligonucleotide"
ctcagcgaaccaatgccattc

SEQ ID NO: 34327 - DNA, 21 bp, Artificial Sequence
  source: /note="Description of Artificial Sequence: Synthetic oligonucleotide"
ctcagcgaacaaacaagatac

SEQ ID NO: 34328 - DNA, 21 bp, Artificial Sequence
  source: /note="Description of Artificial Sequence: Synthetic oligonucleotide"
ctcagcgaaagaggagacatg

SEQ ID NO: 34329 - DNA, 21 bp, Artificial Sequence
  source: /note="Description of Artificial Sequence: Synthetic oligonucleotide"
ctcagcgaaagaccagtcctc

SEQ ID NO: 34330 - DNA, 21 bp, Artificial Sequence
  source: /note="Description of Artificial Sequence: Synthetic oligonucleotide"
ctcagcgaaagcaaccaagtc

SEQ ID NO: 34331 - DNA, 21 bp, Artificial Sequence
  source: /note="Description of Artificial Sequence: Synthetic oligonucleotide"
ctcagcgaaagctacgtcgtc

SEQ ID NO: 34332 - DNA, 21 bp, Artificial Sequence
  source: /note="Description of Artificial Sequence: Synthetic oligonucleotide"
ctcagcttcggaacaacaaca

SEQ ID NO: 34333 - DNA, 21 bp, Artificial Sequence
  source: /note="Description of Artificial Sequence: Synthetic oligonucleotide"
ctcagcttcaaaacacaactc

SEQ ID NO: 34334 - DNA, 21 bp, Artificial Sequence
  source: /note="Description of Artificial Sequence: Synthetic oligonucleotide"
ctcagcttcagcgcagaaagc

SEQ ID NO: 34335 - DNA, 21 bp, Artificial Sequence
  source: /note="Description of Artificial Sequence: Synthetic oligonucleotide"
ctcagcttcagcacaagcgga

SEQ ID NO: 34336 - DNA, 21 bp, Artificial Sequence
  source: /note="Description of Artificial Sequence: Synthetic oligonucleotide"
ctcagcggagcagcaggactc

SEQ ID NO: 34337 - DNA, 21 bp, Artificial Sequence
  source: /note="Description of Artificial Sequence: Synthetic oligonucleotide"
ctcagcggagcaatcccacca

SEQ ID NO: 34338 - DNA, 21 bp, Artificial Sequence
  source: /note="Description of Artificial Sequence: Synthetic oligonucleotide"
ctcagcggagcaaacagcgga

SEQ ID NO: 34339 - DNA, 21 bp, Artificial Sequence
  source: /note="Description of Artificial Sequence: Synthetic oligonucleotide"
ctcagcggagaacaagcactc

SEQ ID NO: 34340 - DNA, 21 bp, Artificial Sequence
  source: /note="Description of Artificial Sequence: Synthetic oligonucleotide"
ctcagcggaggagaaccacca

SEQ ID NO: 34341 - DNA, 21 bp, Artificial Sequence
  source: /note="Description of Artificial Sequence: Synthetic oligonucleotide"
ctcagcggaggacaaatcagc

SEQ ID NO: 34342 - DNA, 21 bp, Artificial Sequence
  source: /note="Description of Artificial Sequence: Synthetic oligonucleotide"
ctcagcggacaccacatcgtc

SEQ ID NO: 34343 - DNA, 21 bp, Artificial Sequence
  source: /note="Description of Artificial Sequence: Synthetic oligonucleotide"
ctcagcggaatcgcaggaatc

SEQ ID NO: 34344 - DNA, 21 bp, Artificial Sequence
  source: /note="Description of Artificial Sequence: Synthetic oligonucleotide"
ctcagcggaccaagcagcctc

SEQ ID NO: 34345 - DNA, 21 bp, Artificial Sequence
  source: /note="Description of Artificial Sequence: Synthetic oligonucleotide"
ctcagcggaacaccaggaatc

SEQ ID NO: 34346 - DNA, 21 bp, Artificial Sequence
  source: /note="Description of Artificial Sequence: Synthetic oligonucleotide"
ctcagcggagtcgcaatccaa

SEQ ID NO: 34347 - DNA, 21 bp, Artificial Sequence
  source: /note="Description of Artificial Sequence: Synthetic oligonucleotide"
ctcagccacgacgtcctcaca

SEQ ID NO: 34348 - DNA, 21 bp, Artificial Sequence
  source: /note="Description of Artificial Sequence: Synthetic oligonucleotide"
ctcagccacggaatgctcgga

SEQ ID NO: 34349 - DNA, 21 bp, Artificial Sequence
  source: /note="Description of Artificial Sequence: Synthetic oligonucleotide"
ctcagccacaaactcacagaa

SEQ ID NO: 34350 - DNA, 21 bp, Artificial Sequence
  source: /note="Description of Artificial Sequence: Synthetic oligonucleotide"
ctcagccacctcggattccca

SEQ ID NO: 34351 - DNA, 21 bp, Artificial Sequence
  source: /note="Description of Artificial Sequence: Synthetic oligonucleotide"
ctcagccacccaatgggatac

SEQ ID NO: 34352 - DNA, 21 bp, Artificial Sequence
  source: /note="Description of Artificial Sequence: Synthetic oligonucleotide"
ctcagccacagcatcccaaga

SEQ ID NO: 34353 - DNA, 21 bp, Artificial Sequence
  source: /note="Description of Artificial Sequence: Synthetic oligonucleotide"
ctcagccacacaacaaacgga

SEQ ID NO: 34354 - DNA, 21 bp, Artificial Sequence
  source: /note="Description of Artificial Sequence: Synthetic oligonucleotide"
ctcagccacgtcacaacagca

SEQ ID NO: 34355 - DNA, 21 bp, Artificial Sequence
  source: /note="Description of Artificial Sequence: Synthetic oligonucleotide"
ctcagcatcctcagcggaatc

SEQ ID NO: 34356 - DNA, 21 bp, Artificial Sequence
  source: /note="Description of Artificial Sequence: Synthetic oligonucleotide"
ctcagcatcccaagcggacca

SEQ ID NO: 34357 - DNA, 21 bp, Artificial Sequence
  source: /note="Description of Artificial Sequence: Synthetic oligonucleotide"
ctcagcaaagaaccattcatg

SEQ ID NO: 34358 - DNA, 21 bp, Artificial Sequence
  source: /note="Description of Artificial Sequence: Synthetic oligonucleotide"
ctcagcaaaggattcatggga

SEQ ID NO: 34359 - DNA, 21 bp, Artificial Sequence
  source: /note="Description of Artificial Sequence: Synthetic oligonucleotide"
ctcagcaaaggaaacgcagca

SEQ ID NO: 34360 - DNA, 21 bp, Artificial Sequence
  source: /note="Description of Artificial Sequence: Synthetic oligonucleotide"
ctcagcaaaacactcgaagaa

SEQ ID NO: 34361 - DNA, 21 bp, Artificial Sequence
  source: /note="Description of Artificial Sequence: Synthetic oligonucleotide"
ctcagcctcggagcaagcgca

SEQ ID NO: 34362 - DNA, 21 bp, Artificial Sequence
  source: /note="Description of Artificial Sequence: Synthetic oligonucleotide"
ctcagcctcggaccacacagc

SEQ ID NO: 34363 - DNA, 21 bp, Artificial Sequence
  source: /note="Description of Artificial Sequence: Synthetic oligonucleotide"
ctcagcctcggagtcgacagc

SEQ ID NO: 34364 - DNA, 21 bp, Artificial Sequence
  source: /note="Description of Artificial Sequence: Synthetic oligonucleotide"
ctcagcctccacccagcacca

SEQ ID NO: 34365 - DNA, 21 bp, Artificial Sequence
  source: /note="Description of Artificial Sequence: Synthetic oligonucleotide"
ctcagcctcaaacacctcaaa

SEQ ID NO: 34366 - DNA, 21 bp, Artificial Sequence
  source: /note="Description of Artificial Sequence: Synthetic oligonucleotide"
ctcagcctcccacaaagcatg

SEQ ID NO: 34367 - DNA, 21 bp, Artificial Sequence
  source: /note="Description of Artificial Sequence: Synthetic oligonucleotide"
ctcagcctcccaagaagcgac

SEQ ID NO: 34368 - DNA, 21 bp, Artificial Sequence
  source: /note="Description of Artificial Sequence: Synthetic oligonucleotide"
ctcagcctcccatacaacaga

SEQ ID NO: 34369 - DNA, 21 bp, Artificial Sequence
  source: /note="Description of Artificial Sequence: Synthetic oligonucleotide"
ctcagcctccaaacagtccca

SEQ ID NO: 34370 - DNA, 21 bp, Artificial Sequence
  source: /note="Description of Artificial Sequence: Synthetic oligonucleotide"
ctcagcctcagcaaaggaagc

SEQ ID NO: 34371 - DNA, 21 bp, Artificial Sequence
  source: /note="Description of Artificial Sequence: Synthetic oligonucleotide"
ctcagcctcagcccagtcgtc

SEQ ID NO: 34372 - DNA, 21 bp, Artificial Sequence
  source: /note="Description of Artificial Sequence: Synthetic oligonucleotide"
ctcagcctcgtcaaacacgac

SEQ ID NO: 34373 - DNA, 21 bp, Artificial Sequence
  source: /note="Description of Artificial Sequence: Synthetic oligonucleotide"
ctcagcatggcaagaacacca

SEQ ID NO: 34374 - DNA, 21 bp, Artificial Sequence
  source: /note="Description of Artificial Sequence: Synthetic oligonucleotide"
ctcagcatgaacccaaacgga

SEQ ID NO: 34375 - DNA, 21 bp, Artificial Sequence
  source: /note="Description of Artificial Sequence: Synthetic oligonucleotide"
ctcagcatgaacgtccaatac

SEQ ID NO: 34376 - DNA, 21 bp, Artificial Sequence
  source: /note="Description of Artificial Sequence: Synthetic oligonucleotide"
ctcagcatgcaaagaacagtc

SEQ ID NO: 34377 - DNA, 21 bp, Artificial Sequence
  source: /note="Description of Artificial Sequence: Synthetic oligonucleotide"
ctcagcatgagaagcgaaaca

SEQ ID NO: 34378 - DNA, 21 bp, Artificial Sequence
  source: /note="Description of Artificial Sequence: Synthetic oligonucleotide"
ctcagcatgagcaaaacacca

SEQ ID NO: 34379 - DNA, 21 bp, Artificial Sequence
  source: /note="Description of Artificial Sequence: Synthetic oligonucleotide"
ctcagcaacgaaggaagctac

SEQ ID NO: 34380 - DNA, 21 bp, Artificial Sequence
  source: /note="Description of Artificial Sequence: Synthetic oligonucleotide"
ctcagcaacggaagatacagc

SEQ ID NO: 34381 - DNA, 21 bp, Artificial Sequence
  source: /note="Description of Artificial Sequence: Synthetic oligonucleotide"
ctcagcaaccacccattcagc

SEQ ID NO: 34382 - DNA, 21 bp, Artificial Sequence
  source: /note="Description of Artificial Sequence: Synthetic oligonucleotide"
ctcagcaaccacgtcatcaca

SEQ ID NO: 34383 - DNA, 21 bp, Artificial Sequence
  source: /note="Description of Artificial Sequence: Synthetic oligonucleotide"
ctcagcaacatgcaacaaaaa

SEQ ID NO: 34384 - DNA, 21 bp, Artificial Sequence
  source: /note="Description of Artificial Sequence: Synthetic oligonucleotide"
ctcagcaacccagcaaaaaca

SEQ ID NO: 34385 - DNA, 21 bp, Artificial Sequence
  source: /note="Description of Artificial Sequence: Synthetic oligonucleotide"
ctcagcaacccaacaagaagc

SEQ ID NO: 34386 - DNA, 21 bp, Artificial Sequence
  source: /note="Description of Artificial Sequence: Synthetic oligonucleotide"
ctcagcaacagaaaaggagaa

SEQ ID NO: 34387 - DNA, 21 bp, Artificial Sequence
  source: /note="Description of Artificial Sequence: Synthetic oligonucleotide"
ctcagcaacagacaaatcaca

SEQ ID NO: 34388 - DNA, 21 bp, Artificial Sequence
  source: /note="Description of Artificial Sequence: Synthetic oligonucleotide"
ctcagcaacagcgcaatcctc

SEQ ID NO: 34389 - DNA, 21 bp, Artificial Sequence
  source: /note="Description of Artificial Sequence: Synthetic oligonucleotide"
ctcagcaacagcaaaggacca

SEQ ID NO: 34390 - DNA, 21 bp, Artificial Sequence
  source: /note="Description of Artificial Sequence: Synthetic oligonucleotide"
ctcagcaacagcagacacgac

SEQ ID NO: 34391 - DNA, 21 bp, Artificial Sequence
  source: /note="Description of Artificial Sequence: Synthetic oligonucleotide"
ctcagcaacagcagcagaatg

SEQ ID NO: 34392 - DNA, 21 bp, Artificial Sequence
  source: /note="Description of Artificial Sequence: Synthetic oligonucleotide"
ctcagcccagcagtcacaaga

SEQ ID NO: 34393 - DNA, 21 bp, Artificial Sequence
  source: /note="Description of Artificial Sequence: Synthetic oligonucleotide"
ctcagcccatgcccaagcaac

SEQ ID NO: 34394 - DNA, 21 bp, Artificial Sequence
  source: /note="Description of Artificial Sequence: Synthetic oligonucleotide"
ctcagcccattcagcgtcgtc

SEQ ID NO: 34395 - DNA, 21 bp, Artificial Sequence
  source: /note="Description of Artificial Sequence: Synthetic oligonucleotide"
ctcagcccaggaatcgcacaa

SEQ ID NO: 34396 - DNA, 21 bp, Artificial Sequence
  source: /note="Description of Artificial Sequence: Synthetic oligonucleotide"
ctcagcccacacagaacaagc

SEQ ID NO: 34397 - DNA, 21 bp, Artificial Sequence
  source: /note="Description of Artificial Sequence: Synthetic oligonucleotide"
ctcagcccaaaattcgtcctc

SEQ ID NO: 34398 - DNA, 21 bp, Artificial Sequence
  source: /note="Description of Artificial Sequence: Synthetic oligonucleotide"
ctcagcccaaacggaccaaac

SEQ ID NO: 34399 - DNA, 21 bp, Artificial Sequence
  source: /note="Description of Artificial Sequence: Synthetic oligonucleotide"
ctcagcccaccagacagactc

SEQ ID NO: 34400 - DNA, 21 bp, Artificial Sequence
  source: /note="Description of Artificial Sequence: Synthetic oligonucleotide"
ctcagcccaccaccagtcgac

SEQ ID NO: 34401 - DNA, 21 bp, Artificial Sequence
  source: /note="Description of Artificial Sequence: Synthetic oligonucleotide"
ctcagcccaccaacaccacac

SEQ ID NO: 34402 - DNA, 21 bp, Artificial Sequence
  source: /note="Description of Artificial Sequence: Synthetic oligonucleotide"
ctcagcccaagaacagtccac

SEQ ID NO: 34403 - DNA, 21 bp, Artificial Sequence
  source: /note="Description of Artificial Sequence: Synthetic oligonucleotide"
ctcagcccaagcttcacaagc

SEQ ID NO: 34404 - DNA, 21 bp, Artificial Sequence
  source: /note="Description of Artificial Sequence: Synthetic oligonucleotide"
ctcagcccaagcagcctcttc

SEQ ID NO: 34405 - DNA, 21 bp, Artificial Sequence
  source: /note="Description of Artificial Sequence: Synthetic oligonucleotide"
ctcagcccaagcagcctcgga

SEQ ID NO: 34406 - DNA, 21 bp, Artificial Sequence
  source: /note="Description of Artificial Sequence: Synthetic oligonucleotide"
ctcagcccaagcagcagagga

SEQ ID NO: 34407 - DNA, 21 bp, Artificial Sequence
  source: /note="Description of Artificial Sequence: Synthetic oligonucleotide"
ctcagcccaagcacagacttc

SEQ ID NO: 34408 - DNA, 21 bp, Artificial Sequence
  source: /note="Description of Artificial Sequence: Synthetic oligonucleotide"
ctcagcccaagcgtcacaaaa

SEQ ID NO: 34409 - DNA, 21 bp, Artificial Sequence
  source: /note="Description of Artificial Sequence: Synthetic oligonucleotide"
ctcagcccaacaagaacacaa

SEQ ID NO: 34410 - DNA, 21 bp, Artificial Sequence
  source: /note="Description of Artificial Sequence: Synthetic oligonucleotide"
ctcagcccaacagtcgcatac

SEQ ID NO: 34411 - DNA, 21 bp, Artificial Sequence
  source: /note="Description of Artificial Sequence: Synthetic oligonucleotide"
ctcagcccagtcccagtcgca

SEQ ID NO: 34412 - DNA, 21 bp, Artificial Sequence
  source: /note="Description of Artificial Sequence: Synthetic oligonucleotide"
ctcagcccagtccaagcagca

SEQ ID NO: 34413 - DNA, 21 bp, Artificial Sequence
  source: /note="Description of Artificial Sequence: Synthetic oligonucleotide"
ctcagccaagcaatccaaagc

SEQ ID NO: 34414 - DNA, 21 bp, Artificial Sequence
  source: /note="Description of Artificial Sequence: Synthetic oligonucleotide"
ctcagccaagcaaaaaacgtc

SEQ ID NO: 34415 - DNA, 21 bp, Artificial Sequence
  source: /note="Description of Artificial Sequence: Synthetic oligonucleotide"
ctcagccaagcactcctcgac

SEQ ID NO: 34416 - DNA, 21 bp, Artificial Sequence
  source: /note="Description of Artificial Sequence: Synthetic oligonucleotide"
ctcagccaagcaaacgaaaga

SEQ ID NO: 34417 - DNA, 21 bp, Artificial Sequence
  source: /note="Description of Artificial Sequence: Synthetic oligonucleotide"
ctcagccaagacctcacagtc

SEQ ID NO: 34418 - DNA, 21 bp, Artificial Sequence
  source: /note="Description of Artificial Sequence: Synthetic oligonucleotide"
ctcagccaaggaagcgcacca

SEQ ID NO: 34419 - DNA, 21 bp, Artificial Sequence
  source: /note="Description of Artificial Sequence: Synthetic oligonucleotide"
ctcagccaacacgcaagcaca

SEQ ID NO: 34420 - DNA, 21 bp, Artificial Sequence
  source: /note="Description of Artificial Sequence: Synthetic oligonucleotide"
ctcagccaacacatgagacca

SEQ ID NO: 34421 - DNA, 21 bp, Artificial Sequence
  source: /note="Description of Artificial Sequence: Synthetic oligonucleotide"
ctcagccaaaaaacaggaatc

SEQ ID NO: 34422 - DNA, 21 bp, Artificial Sequence
  source: /note="Description of Artificial Sequence: Synthetic oligonucleotide"
ctcagccaactcatccaagga

SEQ ID NO: 34423 - DNA, 21 bp, Artificial Sequence
  source: /note="Description of Artificial Sequence: Synthetic oligonucleotide"
ctcagccaactcacaccaagc

SEQ ID NO: 34424 - DNA, 21 bp, Artificial Sequence
  source: /note="Description of Artificial Sequence: Synthetic oligonucleotide"
ctcagccaactcacaagccaa

SEQ ID NO: 34425 - DNA, 21 bp, Artificial Sequence
  source: /note="Description of Artificial Sequence: Synthetic oligonucleotide"
ctcagccaactcgtcagcagc

SEQ ID NO: 34426 - DNA, 21 bp, Artificial Sequence
  source: /note="Description of Artificial Sequence: Synthetic oligonucleotide"
ctcagccaaccactcaacatg

SEQ ID NO: 34427 - DNA, 21 bp, Artificial Sequence
  source: /note="Description of Artificial Sequence: Synthetic oligonucleotide"
ctcagccaaagcttcgcaagc

SEQ ID NO: 34428 - DNA, 21 bp, Artificial Sequence
  source: /note="Description of Artificial Sequence: Synthetic oligonucleotide"
ctcagccaaacagcaagagca

SEQ ID NO: 34429 - DNA, 21 bp, Artificial Sequence
  source: /note="Description of Artificial Sequence: Synthetic oligonucleotide"
ctcagccaagtccacaaattc

SEQ ID NO: 34430 - DNA, 21 bp, Artificial Sequence
  source: /note="Description of Artificial Sequence: Synthetic oligonucleotide"
ctcagccaagtccaagcagga

SEQ ID NO: 34431 - DNA, 21 bp, Artificial Sequence
  source: /note="Description of Artificial Sequence: Synthetic oligonucleotide"
ctcagcagagacctcgaactc

SEQ ID NO: 34432 - DNA, 21 bp, Artificial Sequence
  source: /note="Description of Artificial Sequence: Synthetic oligonucleotide"
ctcagcagaggaccaacacca

SEQ ID NO: 34433 - DNA, 21 bp, Artificial Sequence
  source: /note="Description of Artificial Sequence: Synthetic oligonucleotide"
ctcagcagaggacaagtccca

SEQ ID NO: 34434 - DNA, 21 bp, Artificial Sequence
  source: /note="Description of Artificial Sequence: Synthetic oligonucleotide"
ctcagcagactcggaccaagc

SEQ ID NO: 34435 - DNA, 21 bp, Artificial Sequence
  source: /note="Description of Artificial Sequence: Synthetic oligonucleotide"
ctcagcagactcccaagcagc

SEQ ID NO: 34436 - DNA, 21 bp, Artificial Sequence
  source: /note="Description of Artificial Sequence: Synthetic oligonucleotide"
ctcagcagactcagcacagac

SEQ ID NO: 34437 - DNA, 21 bp, Artificial Sequence
  source: /note="Description of Artificial Sequence: Synthetic oligonucleotide"
ctcagcagaaacgtcacagaa

SEQ ID NO: 34438 - DNA, 21 bp, Artificial Sequence
  source: /note="Description of Artificial Sequence: Synthetic oligonucleotide"
ctcagcagacaaacaggatac

SEQ ID NO: 34439 - DNA, 21 bp, Artificial Sequence
  source: /note="Description of Artificial Sequence: Synthetic oligonucleotide"
ctcagcagaagcagcgcagca

SEQ ID NO: 34440 - DNA, 21 bp, Artificial Sequence
  source: /note="Description of Artificial Sequence: Synthetic oligonucleotide"
ctcagcagaagcgtcagcaca

SEQ ID NO: 34441 - DNA, 21 bp, Artificial Sequence
  source: /note="Description of Artificial Sequence: Synthetic oligonucleotide"
ctcagcagaacaacagcagac

SEQ ID NO: 34442 - DNA, 21 bp, Artificial Sequence
  source: /note="Description of Artificial Sequence: Synthetic oligonucleotide"
ctcagcagagtcgcagtcctc

SEQ ID NO: 34443 - DNA, 21 bp, Artificial Sequence
  source: /note="Description of Artificial Sequence: Synthetic oligonucleotide"
ctcagcagcgcaaacagcaca

SEQ ID NO: 34444 - DNA, 21 bp, Artificial Sequence
  source: /note="Description of Artificial Sequence: Synthetic oligonucleotide"
ctcagcagcgcacaaagagca

SEQ ID NO: 34445 - DNA, 21 bp, Artificial Sequence
  source: /note="Description of Artificial Sequence: Synthetic oligonucleotide"
ctcagcagcgacagcccagtc

SEQ ID NO: 34446 - DNA, 21 bp, Artificial Sequence
  source: /note="Description of Artificial Sequence: Synthetic oligonucleotide"
ctcagcagcgaatgcgcacca

SEQ ID NO: 34447 - DNA, 21 bp, Artificial Sequence
  source: /note="Description of Artificial Sequence: Synthetic oligonucleotide"
ctcagcagcggaatgagcaga

SEQ ID NO: 34448 - DNA, 21 bp, Artificial Sequence
  source: /note="Description of Artificial Sequence: Synthetic oligonucleotide"
ctcagcagcggaagaccacca

SEQ ID NO: 34449 - DNA, 21 bp, Artificial Sequence
  source: /note="Description of Artificial Sequence: Synthetic oligonucleotide"
ctcagcagccacagcacaagc

SEQ ID NO: 34450 - DNA, 21 bp, Artificial Sequence
  source: /note="Description of Artificial Sequence: Synthetic oligonucleotide"
ctcagcagcatccaaacatac

SEQ ID NO: 34451 - DNA, 21 bp, Artificial Sequence
  source: /note="Description of Artificial Sequence: Synthetic oligonucleotide"
ctcagcagcatcagccacaac

SEQ ID NO: 34452 - DNA, 21 bp, Artificial Sequence
  source: /note="Description of Artificial Sequence: Synthetic oligonucleotide"
ctcagcagcaaaccatacgca

SEQ ID NO: 34453 - DNA, 21 bp, Artificial Sequence
  source: /note="Description of Artificial Sequence: Synthetic oligonucleotide"
ctcagcagcctcgcaatggtc

SEQ ID NO: 34454 - DNA, 21 bp, Artificial Sequence
  source: /note="Description of Artificial Sequence: Synthetic oligonucleotide"
ctcagcagcctcaaaggaaac

SEQ ID NO: 34455 - DNA, 21 bp, Artificial Sequence
  source: /note="Description of Artificial Sequence: Synthetic oligonucleotide"
ctcagcagcctcaaactcgca

SEQ ID NO: 34456 - DNA, 21 bp, Artificial Sequence
  source: /note="Description of Artificial Sequence: Synthetic oligonucleotide"
ctcagcagcctcatgcacagc

SEQ ID NO: 34457 - DNA, 21 bp, Artificial Sequence
  source: /note="Description of Artificial Sequence: Synthetic oligonucleotide"
ctcagcagcctcaacccaagc

SEQ ID NO: 34458 - DNA, 21 bp, Artificial Sequence
  source: /note="Description of Artificial Sequence: Synthetic oligonucleotide"
ctcagcagcctcccaaaaatc

SEQ ID NO: 34459 - DNA, 21 bp, Artificial Sequence
  source: /note="Description of Artificial Sequence: Synthetic oligonucleotide"
ctcagcagcatgagaagcaca

SEQ ID NO: 34460 - DNA, 21 bp, Artificial Sequence
  source: /note="Description of Artificial Sequence: Synthetic oligonucleotide"
ctcagcagcatgacaaacgac

SEQ ID NO: 34461 - DNA, 21 bp, Artificial Sequence
  source: /note="Description of Artificial Sequence: Synthetic oligonucleotide"
ctcagcagcaacagcctcgac

SEQ ID NO: 34462 - DNA, 21 bp, Artificial Sequence
  source: /note="Description of Artificial Sequence: Synthetic oligonucleotide"
ctcagcagcccagcaggaagc

SEQ ID NO: 34463 - DNA, 21 bp, Artificial Sequence
  source: /note="Description of Artificial Sequence: Synthetic oligonucleotide"
ctcagcagcccaggaagcatg

SEQ ID NO: 34464 - DNA, 21 bp, Artificial Sequence
  source: /note="Description of Artificial Sequence: Synthetic oligonucleotide"
ctcagcagcccaatggacagc

SEQ ID NO: 34465 - DNA, 21 bp, Artificial Sequence
  source: /note="Description of Artificial Sequence: Synthetic oligonucleotide"
ctcagcagccaatgcatcaac

SEQ ID NO: 34466 - DNA, 21 bp, Artificial Sequence
  source: /note="Description of Artificial Sequence: Synthetic oligonucleotide"
ctcagcagccaacacacaagc

SEQ ID NO: 34467 - DNA, 21 bp, Artificial Sequence
  source: /note="Description of Artificial Sequence: Synthetic oligonucleotide"
ctcagcagccaaccaaaattc

SEQ ID NO: 34468 - DNA, 21 bp, Artificial Sequence
  source: /note="Description of Artificial Sequence: Synthetic oligonucleotide"
ctcagcagcagaagcacaaca

SEQ ID NO: 34469 - DNA, 21 bp, Artificial Sequence
  source: /note="Description of Artificial Sequence: Synthetic oligonucleotide"
ctcagcagcagctgcgaaaga

SEQ ID NO: 34470 - DNA, 21 bp, Artificial Sequence
  source: /note="Description of Artificial Sequence: Synthetic oligonucleotide"
ctcagcagcagcctcgaatac

SEQ ID NO: 34471 - DNA, 21 bp, Artificial Sequence
  source: /note="Description of Artificial Sequence: Synthetic oligonucleotide"
ctcagcagcagcagaccaagc

SEQ ID NO: 34472 - DNA, 21 bp, Artificial Sequence
  source: /note="Description of Artificial Sequence: Synthetic oligonucleotide"
ctcagcagcagcgtcgtcttc

SEQ ID NO: 34473 - DNA, 21 bp, Artificial Sequence
  source: /note="Description of Artificial Sequence: Synthetic oligonucleotide"
ctcagcagcacaagcaaagca

SEQ ID NO: 34474 - DNA, 21 bp, Artificial Sequence
  source: /note="Description of Artificial Sequence: Synthetic oligonucleotide"
ctcagcagcgtcgcaacacca

SEQ ID NO: 34475 - DNA, 21 bp, Artificial Sequence
  source: /note="Description of Artificial Sequence: Synthetic oligonucleotide"
ctcagcagcgtcttcagaaca

SEQ ID NO: 34476 - DNA, 21 bp, Artificial Sequence
  source: /note="Description of Artificial Sequence: Synthetic oligonucleotide"
ctcagcagcgtccacgcagtc

SEQ ID NO: 34477 - DNA, 21 bp, Artificial Sequence
  source: /note="Description of Artificial Sequence: Synthetic oligonucleotide"
ctcagcagcgtcagactcagc

SEQ ID NO: 34478 - DNA, 21 bp, Artificial Sequence
  source: /note="Description of Artificial Sequence: Synthetic oligonucleotide"
ctcagcacagcagtcacaaga

SEQ ID NO: 34479 - DNA, 21 bp, Artificial Sequence
  source: /note="Description of Artificial Sequence: Synthetic oligonucleotide"
ctcagcacagaagacctcctc

SEQ ID NO: 34480 - DNA, 21 bp, Artificial Sequence
  source: /note="Description of Artificial Sequence: Synthetic oligonucleotide"
ctcagcacattcccagtcgca

SEQ ID NO: 34481 - DNA, 21 bp, Artificial Sequence
  source: /note="Description of Artificial Sequence: Synthetic oligonucleotide"
ctcagcacattccaaggagga

SEQ ID NO: 34482 - DNA, 21 bp, Artificial Sequence
  source: /note="Description of Artificial Sequence: Synthetic oligonucleotide"
ctcagcacaggaagcagacaa

SEQ ID NO: 34483 - DNA, 21 bp, Artificial Sequence
  source: /note="Description of Artificial Sequence: Synthetic oligonucleotide"
ctcagcacaggaacaatggac

SEQ ID NO: 34484 - DNA, 21 bp, Artificial Sequence
  source: /note="Description of Artificial Sequence: Synthetic oligonucleotide"
ctcagcacaatccacccaagc

SEQ ID NO: 34485 - DNA, 21 bp, Artificial Sequence
  source: /note="Description of Artificial Sequence: Synthetic oligonucleotide"
ctcagcacaaaaggaacaatg

SEQ ID NO: 34486 - DNA, 21 bp, Artificial Sequence
  source: /note="Description of Artificial Sequence: Synthetic oligonucleotide"
ctcagcacactcgaaaacgaa

SEQ ID NO: 34487 - DNA, 21 bp, Artificial Sequence
  source: /note="Description of Artificial Sequence: Synthetic oligonucleotide"
ctcagcacactcctcacagca

SEQ ID NO: 34488 - DNA, 21 bp, Artificial Sequence
  source: /note="Description of Artificial Sequence: Synthetic oligonucleotide"
ctcagcacactcccaaaagac

SEQ ID NO: 34489 - DNA, 21 bp, Artificial Sequence
  source: /note="Description of Artificial Sequence: Synthetic oligonucleotide"
ctcagcacaatgagcagcctc

SEQ ID NO: 34490 - DNA, 21 bp, Artificial Sequence
  source: /note="Description of Artificial Sequence: Synthetic oligonucleotide"
ctcagcacaatgacagcatac

SEQ ID NO: 34491 - DNA, 21 bp, Artificial Sequence
  source: /note="Description of Artificial Sequence: Synthetic oligonucleotide"
ctcagcacaaacatgccacca

SEQ ID NO: 34492 - DNA, 21 bp, Artificial Sequence
  source: /note="Description of Artificial Sequence: Synthetic oligonucleotide"
ctcagcacaccacacctcaca

SEQ ID NO: 34493 - DNA, 21 bp, Artificial Sequence
  source: /note="Description of Artificial Sequence: Synthetic oligonucleotide"
ctcagcacaccacacatggca

SEQ ID NO: 34494 - DNA, 21 bp, Artificial Sequence
  source: /note="Description of Artificial Sequence: Synthetic oligonucleotide"
ctcagcacaccaagccaacca

SEQ ID NO: 34495 - DNA, 21 bp, Artificial Sequence
  source: /note="Description of Artificial Sequence: Synthetic oligonucleotide"
ctcagcacaagaagcctccca

SEQ ID NO: 34496 - DNA, 21 bp, Artificial Sequence
  source: /note="Description of Artificial Sequence: Synthetic oligonucleotide"
ctcagcacaagaagcccactc

SEQ ID NO: 34497 - DNA, 21 bp, Artificial Sequence
  source: /note="Description of Artificial Sequence: Synthetic oligonucleotide"
ctcagcacaagccacagcgtc

SEQ ID NO: 34498 - DNA, 21 bp, Artificial Sequence
  source: /note="Description of Artificial Sequence: Synthetic oligonucleotide"
ctcagcacagtcagaatggtc

SEQ ID NO: 34499 - DNA, 21 bp, Artificial Sequence
  source: /note="Description of Artificial Sequence: Synthetic oligonucleotide"
ctcagcgtcgacgaaatggtc

SEQ ID NO: 34500 - DNA, 21 bp, Artificial Sequence
  source: /note="Description of Artificial Sequence: Synthetic oligonucleotide"
ctcagcgtcggaagaacagaa

SEQ ID NO: 34501 - DNA, 21 bp, Artificial Sequence
  source: /note="Description of Artificial Sequence: Synthetic oligonucleotide"
ctcagcgtccacggactcaaa

SEQ ID NO: 34502 - DNA, 21 bp, Artificial Sequence
  source: /note="Description of Artificial Sequence: Synthetic oligonucleotide"
ctcagcgtcaacagcagcctc

SEQ ID NO: 34503 - DNA, 21 bp, Artificial Sequence
  source: /note="Description of Artificial Sequence: Synthetic oligonucleotide"
ctcagcgtcccaatgccagac

SEQ ID NO: 34504 - DNA, 21 bp, Artificial Sequence
  source: /note="Description of Artificial Sequence: Synthetic oligonucleotide"
ctcagcgtcccaagagcacca

SEQ ID NO: 34505 - DNA, 21 bp, Artificial Sequence
  source: /note="Description of Artificial Sequence: Synthetic oligonucleotide"
ctcagcgtcagaggacacatc

SEQ ID NO: 34506 - DNA, 21 bp, Artificial Sequence
  source: /note="Description of Artificial Sequence: Synthetic oligonucleotide"
ctcagcgtcagaagcatcgga

SEQ ID NO: 34507 - DNA, 21 bp, Artificial Sequence
  source: /note="Description of Artificial Sequence: Synthetic oligonucleotide"
ctcagcgtcagcctcacagca

SEQ ID NO: 34508 - DNA, 21 bp, Artificial Sequence
  source: /note="Description of Artificial Sequence: Synthetic oligonucleotide"
ctcagcgtcagcccactcagc

SEQ ID NO: 34509 - DNA, 21 bp, Artificial Sequence
  source: /note="Description of Artificial Sequence: Synthetic oligonucleotide"
ctcagcgtctacacagcagac

SEQ ID NO: 34510 - DNA, 21 bp, Artificial Sequence
  source: /note="Description of Artificial Sequence: Synthetic oligonucleotide"
ctcagctacggaagaccagtc

SEQ ID NO: 34511 - DNA, 21 bp, Artificial Sequence
  source: /note="Description of Artificial Sequence: Synthetic oligonucleotide"
ctcagctacccaagaaacgac

SEQ ID NO: 34512 - DNA, 21 bp, Artificial Sequence
  source: /note="Description of Artificial Sequence: Synthetic oligonucleotide"
ctcacagcaccaagacaagca

SEQ ID NO: 34513 - DNA, 21 bp, Artificial Sequence
  source: /note="Description of Artificial Sequence: Synthetic oligonucleotide"
ctcacagcaccaacaagccaa

SEQ ID NO: 34514 - DNA, 21 bp, Artificial Sequence
  source: /note="Description of Artificial Sequence: Synthetic oligonucleotide"
ctcacagcaagcatcggaaac

SEQ ID NO: 34515 - DNA, 21 bp, Artificial Sequence
  source: /note="Description of Artificial Sequence: Synthetic oligonucleotide"
ctcacagcaagcatcaaagca

SEQ ID NO: 34516 - DNA, 21 bp, Artificial Sequence
  source: /note="Description of Artificial Sequence: Synthetic oligonucleotide"
ctcacagcagtcccactcagc

SEQ ID NO: 34517 - DNA, 21 bp, Artificial Sequence
  source: /note="Description of Artificial Sequence: Synthetic oligonucleotide"
ctcacagacgaaaacgtctgc

SEQ ID NO: 34518 - DNA, 21 bp, Artificial Sequence
  source: /note="Description of Artificial Sequence: Synthetic oligonucleotide"
ctcacagacatcacaaacaga

SEQ ID NO: 34519 - DNA, 21 bp, Artificial Sequence
  source: /note="Description of Artificial Sequence: Synthetic oligonucleotide"
ctcacagacctcgaccaaatg

SEQ ID NO: 34520 - DNA, 21 bp, Artificial Sequence
  source: /note="Description of Artificial Sequence: Synthetic oligonucleotide"
ctcacagacctcagactcgtc

SEQ ID NO: 34521 - DNA, 21 bp, Artificial Sequence
  source: /note="Description of Artificial Sequence: Synthetic oligonucleotide"
ctcacagacctcagcgcaagc

SEQ ID NO: 34522 - DNA, 21 bp, Artificial Sequence
  source: /note="Description of Artificial Sequence: Synthetic oligonucleotide"
ctcacagacagcctcagaaca

SEQ ID NO: 34523 - DNA, 21 bp, Artificial Sequence
  source: /note="Description of Artificial Sequence: Synthetic oligonucleotide"
ctcacagacacaagagtcaca

SEQ ID NO: 34524 - DNA, 21 bp, Artificial Sequence
  source: /note="Description of Artificial Sequence: Synthetic oligonucleotide"
ctcacagaaatgagaccagga

SEQ ID NO: 34525 - DNA, 21 bp, Artificial Sequence
  source: /note="Description of Artificial Sequence: Synthetic oligonucleotide"
ctcacagaaacaagagcagga

SEQ ID NO: 34526 - DNA, 21 bp, Artificial Sequence
  source: /note="Description of Artificial Sequence: Synthetic oligonucleotide"
ctcacagaagtcagaacatac

SEQ ID NO: 34527 - DNA, 21 bp, Artificial Sequence
  source: /note="Description of Artificial Sequence: Synthetic oligonucleotide"
ctcacagaatggagcaaagaa

SEQ ID NO: 34528 - DNA, 21 bp, Artificial Sequence
  source: /note="Description of Artificial Sequence: Synthetic oligonucleotide"
ctcacattcggagcaacaagc

SEQ ID NO: 34529 - DNA, 21 bp, Artificial Sequence
  source: /note="Description of Artificial Sequence: Synthetic oligonucleotide"
ctcacattcagcgcaggactc

SEQ ID NO: 34530 - DNA, 21 bp, Artificial Sequence
  source: /note="Description of Artificial Sequence: Synthetic oligonucleotide"
ctcacaggagcattcaaaagc

SEQ ID NO: 34531 - DNA, 21 bp, Artificial Sequence
  source: /note="Description of Artificial Sequence: Synthetic oligonucleotide"
ctcacaggagaattcagagac

SEQ ID NO: 34532 - DNA, 21 bp, Artificial Sequence
  source: /note="Description of Artificial Sequence: Synthetic oligonucleotide"
ctcacaggattcagcaaccaa

SEQ ID NO: 34533 - DNA, 21 bp, Artificial Sequence
  source: /note="Description of Artificial Sequence: Synthetic oligonucleotide"
ctcacaggaggactctacgga

SEQ ID NO: 34534 - DNA, 21 bp, Artificial Sequence
  source: /note="Description of Artificial Sequence: Synthetic oligonucleotide"
ctcacaggaggacaagtcgca

SEQ ID NO: 34535 - DNA, 21 bp, Artificial Sequence
  source: /note="Description of Artificial Sequence: Synthetic oligonucleotide"
ctcacaggaatgatcaaatac

SEQ ID NO: 34536 - DNA, 21 bp, Artificial Sequence
  source: /note="Description of Artificial Sequence: Synthetic oligonucleotide"
ctcacaggaaacagaccagca

SEQ ID NO: 34537 - DNA, 21 bp, Artificial Sequence
  source: /note="Description of Artificial Sequence: Synthetic oligonucleotide"
ctcacaggaccatgcacaagc

SEQ ID NO: 34538 - DNA, 21 bp, Artificial Sequence
  source: /note="Description of Artificial Sequence: Synthetic oligonucleotide"
ctcacaggacaaatcagagtc

SEQ ID NO: 34539 - DNA, 21 bp, Artificial Sequence
  source: /note="Description of Artificial Sequence: Synthetic oligonucleotide"
ctcacaggaagaggaggaagc

SEQ ID NO: 34540 - DNA, 21 bp, Artificial Sequence
  source: /note="Description of Artificial Sequence: Synthetic oligonucleotide"
ctcacaggaagcagccacgtc

SEQ ID NO: 34541 - DNA, 21 bp, Artificial Sequence
  source: /note="Description of Artificial Sequence: Synthetic oligonucleotide"
ctcacaggaacactcagaatg

SEQ ID NO: 34542 - DNA, 21 bp, Artificial Sequence
  source: /note="Description of Artificial Sequence: Synthetic oligonucleotide"
ctcacacacgcagtcccaaca

SEQ ID NO: 34543 - DNA, 21 bp, Artificial Sequence
  source: /note="Description of Artificial Sequence: Synthetic oligonucleotide"
ctcacacacaaactcgacgca

SEQ ID NO: 34544 - DNA, 21 bp, Artificial Sequence
  source: /note="Description of Artificial Sequence: Synthetic oligonucleotide"
ctcacacacccagcagtccac

SEQ ID NO: 34545 - DNA, 21 bp, Artificial Sequence
  source: /note="Description of Artificial Sequence: Synthetic oligonucleotide"
ctcacacacgtcccaacagca

SEQ ID NO: 34546 - DNA, 21 bp, Artificial Sequence
  source: /note="Description of Artificial Sequence: Synthetic oligonucleotide"
ctcacaatcggacacgtccca

SEQ ID NO: 34547 - DNA, 21 bp, Artificial Sequence
  source: /note="Description of Artificial Sequence: Synthetic oligonucleotide"
ctcacaatcccaagcgcacaa

SEQ ID NO: 34548 - DNA, 21 bp, Artificial Sequence
  source: /note="Description of Artificial Sequence: Synthetic oligonucleotide"
ctcacaaaaggaagcgtccaa

SEQ ID NO: 34549 - DNA, 21 bp, Artificial Sequence
  source: /note="Description of Artificial Sequence: Synthetic oligonucleotide"
ctcacaaaaagcagccacgca

SEQ ID NO: 34550 - DNA, 21 bp, Artificial Sequence
  source: /note="Description of Artificial Sequence: Synthetic oligonucleotide"
ctcacaaaaacagtcggaagc

SEQ ID NO: 34551 - DNA, 21 bp, Artificial Sequence
  source: /note="Description of Artificial Sequence: Synthetic oligonucleotide"
ctcacactcgcaatcggagca

SEQ ID NO: 34552 - DNA, 21 bp, Artificial Sequence
  source: /note="Description of Artificial Sequence: Synthetic oligonucleotide"
ctcacactcggaccaagaagc

SEQ ID NO: 34553 - DNA, 21 bp, Artificial Sequence
  source: /note="Description of Artificial Sequence: Synthetic oligonucleotide"
ctcacactccaaaaaggaaca

SEQ ID NO: 34554 - DNA, 21 bp, Artificial Sequence
  source: /note="Description of Artificial Sequence: Synthetic oligonucleotide"
ctcacactccaaccaatcgca

SEQ ID NO: 34555 - DNA, 21 bp, Artificial Sequence
  source: /note="Description of Artificial Sequence: Synthetic oligonucleotide"
ctcacactcacaggaagcagc

SEQ ID NO: 34556 - DNA, 21 bp, Artificial Sequence
  source: /note="Description of Artificial Sequence: Synthetic oligonucleotide"
ctcacactcacaagcgcacac

SEQ ID NO: 34557 - DNA, 21 bp, Artificial Sequence
  source: /note="Description of Artificial Sequence: Synthetic oligonucleotide"
ctcacactcgtccacgcagaa

SEQ ID NO: 34558 - DNA, 21 bp, Artificial Sequence
  source: /note="Description of Artificial Sequence: Synthetic oligonucleotide"
ctcacaatgggaagcgcaagc

SEQ ID NO: 34559 - DNA, 21 bp, Artificial Sequence
  source: /note="Description of Artificial Sequence: Synthetic oligonucleotide"
ctcacaatgatccaaagagac

SEQ ID NO: 34560 - DNA, 21 bp, Artificial Sequence
  source: /note="Description of Artificial Sequence: Synthetic oligonucleotide"
ctcacaatgagaccaccaagc

SEQ ID NO: 34561 - DNA, 21 bp, Artificial Sequence
  source: /note="Description of Artificial Sequence: Synthetic oligonucleotide"
ctcacaatgagcagagcactc

SEQ ID NO: 34562 - DNA, 21 bp, Artificial Sequence
  source: /note="Description of Artificial Sequence: Synthetic oligonucleotide"
ctcacaaacgcacaccacctc

SEQ ID NO: 34563 - DNA, 21 bp, Artificial Sequence
  source: /note="Description of Artificial Sequence: Synthetic oligonucleotide"
ctcacaaacgcaagaccagca

SEQ ID NO: 34564 - DNA, 21 bp, Artificial Sequence
  source: /note="Description of Artificial Sequence: Synthetic oligonucleotide"
ctcacaaacgaagcacacaga

SEQ ID NO: 34565 - DNA, 21 bp, Artificial Sequence
  source: /note="Description of Artificial Sequence: Synthetic oligonucleotide"
ctcacaaacaaaccaatctgc

SEQ ID NO: 34566 - DNA, 21 bp, Artificial Sequence
  source: /note="Description of Artificial Sequence: Synthetic oligonucleotide"
ctcacaaacatgagaacaaca

SEQ ID NO: 34567 - DNA, 21 bp, Artificial Sequence
  source: /note="Description of Artificial Sequence: Synthetic oligonucleotide"
ctcacaaacaacgaacaagtc

SEQ ID NO: 34568 - DNA, 21 bp, Artificial Sequence
  source: /note="Description of Artificial Sequence: Synthetic oligonucleotide"
ctcacaaacagacaaaaccaa

SEQ ID NO: 34569 - DNA, 21 bp, Artificial Sequence
  source: /note="Description of Artificial Sequence: Synthetic oligonucleotide"
ctcacaccagcactcggacca

SEQ ID NO: 34570 - DNA, 21 bp, Artificial Sequence
  source: /note="Description of Artificial Sequence: Synthetic oligonucleotide"
ctcacaccagcaagaacatac

SEQ ID NO: 34571 - DNA, 21 bp, Artificial Sequence
  source: /note="Description of Artificial Sequence: Synthetic oligonucleotide"
ctcacaccaggaagaggagtc

SEQ ID NO: 34572 - DNA, 21 bp, Artificial Sequence
  source: /note="Description of Artificial Sequence: Synthetic oligonucleotide"
ctcacaccacacgtcatggac

SEQ ID NO: 34573 - DNA, 21 bp, Artificial Sequence
  source: /note="Description of Artificial Sequence: Synthetic oligonucleotide"
ctcacaccaatcaacagcgca

SEQ ID NO: 34574 - DNA, 21 bp, Artificial Sequence
  source: /note="Description of Artificial Sequence: Synthetic oligonucleotide"
ctcacaccaaaaagcatcagc

SEQ ID NO: 34575 - DNA, 21 bp, Artificial Sequence
  source: /note="Description of Artificial Sequence: Synthetic oligonucleotide"
ctcacaccactcctcggaagc

SEQ ID NO: 34576 - DNA, 21 bp, Artificial Sequence
  source: /note="Description of Artificial Sequence: Synthetic oligonucleotide"
ctcacaccactcatgagcgac

SEQ ID NO: 34577 - DNA, 21 bp, Artificial Sequence
  source: /note="Description of Artificial Sequence: Synthetic oligonucleotide"
ctcacaccaagactcccagca

SEQ ID NO: 34578 - DNA, 21 bp, Artificial Sequence
  source: /note="Description of Artificial Sequence: Synthetic oligonucleotide"
ctcacaccaagcggacactgg

SEQ ID NO: 34579 - DNA, 21 bp, Artificial Sequence
  source: /note="Description of Artificial Sequence: Synthetic oligonucleotide"
ctcacaccaagcggatacaac

SEQ ID NO: 34580 - DNA, 21 bp, Artificial Sequence
  source: /note="Description of Artificial Sequence: Synthetic oligonucleotide"
ctcacaccaagccaaccatac

SEQ ID NO: 34581 - DNA, 21 bp, Artificial Sequence
  source: /note="Description of Artificial Sequence: Synthetic oligonucleotide"
ctcacaccaagcgtcaaagga

SEQ ID NO: 34582 - DNA, 21 bp, Artificial Sequence
  source: /note="Description of Artificial Sequence: Synthetic oligonucleotide"
ctcacaccaagcgtcccacac

SEQ ID NO: 34583 - DNA, 21 bp, Artificial Sequence
  source: /note="Description of Artificial Sequence: Synthetic oligonucleotide"
ctcacaccaacaaaaatggaa

SEQ ID NO: 34584 - DNA, 21 bp, Artificial Sequence
  source: /note="Description of Artificial Sequence: Synthetic oligonucleotide"
ctcacaccagtcagcccagac

SEQ ID NO: 34585 - DNA, 21 bp, Artificial Sequence
  source: /note="Description of Artificial Sequence: Synthetic oligonucleotide"
ctcacacaaaaaacaccatac

SEQ ID NO: 34586 - DNA, 21 bp, Artificial Sequence
  source: /note="Description of Artificial Sequence: Synthetic oligonucleotide"
ctcacacaactcagagtcaca

SEQ ID NO: 34587 - DNA, 21 bp, Artificial Sequence
  source: /note="Description of Artificial Sequence: Synthetic oligonucleotide"
ctcacacaaagccacccagca

SEQ ID NO: 34588 - DNA, 21 bp, Artificial Sequence
  source: /note="Description of Artificial Sequence: Synthetic oligonucleotide"
ctcacaagaaaagaaacagac

SEQ ID NO: 34589 - DNA, 21 bp, Artificial Sequence
  source: /note="Description of Artificial Sequence: Synthetic oligonucleotide"
ctcacaagaccagacgacaca

SEQ ID NO: 34590 - DNA, 21 bp, Artificial Sequence
  source: /note="Description of Artificial Sequence: Synthetic oligonucleotide"
ctcacaagacaacacagcgac

SEQ ID NO: 34591 - DNA, 21 bp, Artificial Sequence
  source: /note="Description of Artificial Sequence: Synthetic oligonucleotide"
ctcacaagaagcccaccagca

SEQ ID NO: 34592 - DNA, 21 bp, Artificial Sequence
  source: /note="Description of Artificial Sequence: Synthetic oligonucleotide"
ctcacaagcgcaccaggaaga

SEQ ID NO: 34593 - DNA, 21 bp, Artificial Sequence
  source: /note="Description of Artificial Sequence: Synthetic oligonucleotide"
ctcacaagcggaaaaagccaa

SEQ ID NO: 34594 - DNA, 21 bp, Artificial Sequence
  source: /note="Description of Artificial Sequence: Synthetic oligonucleotide"
ctcacaagcggaccactcaga

SEQ ID NO: 34595 - DNA, 21 bp, Artificial Sequence
  source: /note="Description of Artificial Sequence: Synthetic oligonucleotide"
ctcacaagccacgcacaatac

SEQ ID NO: 34596 - DNA, 21 bp, Artificial Sequence
  source: /note="Description of Artificial Sequence: Synthetic oligonucleotide"
ctcacaagcaaacacctccca

SEQ ID NO: 34597 - DNA, 21 bp, Artificial Sequence
  source: /note="Description of Artificial Sequence: Synthetic oligonucleotide"
ctcacaagcaaacaaggaagc

SEQ ID NO: 34598 - DNA, 21 bp, Artificial Sequence
  source: /note="Description of Artificial Sequence: Synthetic oligonucleotide"
ctcacaagcctcaaaagcgca

SEQ ID NO: 34599 - DNA, 21 bp, Artificial Sequence
  source: /note="Description of Artificial Sequence: Synthetic oligonucleotide"
ctcacaagcctcagaacagaa

SEQ ID NO: 34600 - DNA, 21 bp, Artificial Sequence
  source: /note="Description of Artificial Sequence: Synthetic oligonucleotide"
ctcacaagcctctacggagtc

SEQ ID NO: 34601 - DNA, 21 bp, Artificial Sequence
  source: /note="Description of Artificial Sequence: Synthetic oligonucleotide"
ctcacaagcaacgaaatgagc

SEQ ID NO: 34602 - DNA, 21 bp, Artificial Sequence
  source: /note="Description of Artificial Sequence: Synthetic oligonucleotide"
ctcacaagcaacagagcactc

SEQ ID NO: 34603 - DNA, 21 bp, Artificial Sequence
  source: /note="Description of Artificial Sequence: Synthetic oligonucleotide"
ctcacaagcagaacagtccca

SEQ ID NO: 34604 - DNA, 21 bp, Artificial Sequence
  source: /note="Description of Artificial Sequence: Synthetic oligonucleotide"
ctcacaagcacagcacaaagc

SEQ ID NO: 34605 - DNA, 21 bp, Artificial Sequence
  source: /note="Description of Artificial Sequence: Synthetic oligonucleotide"
ctcacaagcacaaacggaatg

SEQ ID NO: 34606 - DNA, 21 bp, Artificial Sequence
  source: /note="Description of Artificial Sequence: Synthetic oligonucleotide"
ctcacaagcacaagactcagc

SEQ ID NO: 34607 - DNA, 21 bp, Artificial Sequence
  source: /note="Description of Artificial Sequence: Synthetic oligonucleotide"
ctcacaacagcaagaccactc

SEQ ID NO: 34608 - DNA, 21 bp, Artificial Sequence
  source: /note="Description of Artificial Sequence: Synthetic oligonucleotide"
ctcacaacaggagcatacgga

SEQ ID NO: 34609 - DNA, 21 bp, Artificial Sequence
  source: /note="Description of Artificial Sequence: Synthetic oligonucleotide"
ctcacaacaatcagagacgtc

SEQ ID NO: 34610 - DNA, 21 bp, Artificial Sequence
  source: /note="Description of Artificial Sequence: Synthetic oligonucleotide"
ctcacaacaaaagcagcaaac

SEQ ID NO: 34611 - DNA, 21 bp, Artificial Sequence
  source: /note="Description of Artificial Sequence: Synthetic oligonucleotide"
ctcacaacaaaaaacatggca

SEQ ID NO: 34612 - DNA, 21 bp, Artificial Sequence
  source: /note="Description of Artificial Sequence: Synthetic oligonucleotide"
ctcacaacaaaaagactcgac

SEQ ID NO: 34613 - DNA, 21 bp, Artificial Sequence
  source: /note="Description of Artificial Sequence: Synthetic oligonucleotide"
ctcacaacaaaaagccaagac

SEQ ID NO: 34614 - DNA, 21 bp, Artificial Sequence
  source: /note="Description of Artificial Sequence: Synthetic oligonucleotide"
ctcacaacactccacagcaaa

SEQ ID NO: 34615 - DNA, 21 bp, Artificial Sequence
  source: /note="Description of Artificial Sequence: Synthetic oligonucleotide"
ctcacaacaatgaacgcattc

SEQ ID NO: 34616 - DNA, 21 bp, Artificial Sequence
  source: /note="Description of Artificial Sequence: Synthetic oligonucleotide"
ctcacaacaatgagaagcaac

SEQ ID NO: 34617 - DNA, 21 bp, Artificial Sequence
  source: /note="Description of Artificial Sequence: Synthetic oligonucleotide"
ctcacaacaatgagcaaagca

SEQ ID NO: 34618 - DNA, 21 bp, Artificial Sequence
  source: /note="Description of Artificial Sequence: Synthetic oligonucleotide"
ctcacaacaccactcccacac

SEQ ID NO: 34619 - DNA, 21 bp, Artificial Sequence
  source: /note="Description of Artificial Sequence: Synthetic oligonucleotide"
ctcacaacacaagaacactgg

SEQ ID NO: 34620 - DNA, 21 bp, Artificial Sequence
  source: /note="Description of Artificial Sequence: Synthetic oligonucleotide"
ctcacaacaagaccagcattc

SEQ ID NO: 34621 - DNA, 21 bp, Artificial Sequence
  source: /note="Description of Artificial Sequence: Synthetic oligonucleotide"
ctcacaacaagaagcagccca

SEQ ID NO: 34622 - DNA, 21 bp, Artificial Sequence
  source: /note="Description of Artificial Sequence: Synthetic oligonucleotide"
ctcacaacaagcctcaaacca

SEQ ID NO: 34623 - DNA, 21 bp, Artificial Sequence
  source: /note="Description of Artificial Sequence: Synthetic oligonucleotide"
ctcacaacaagcagcttcaca

SEQ ID NO: 34624 - DNA, 21 bp, Artificial Sequence
  source: /note="Description of Artificial Sequence: Synthetic oligonucleotide"
ctcacaacaacaatcaacaac

SEQ ID NO: 34625 - DNA, 21 bp, Artificial Sequence
  source: /note="Description of Artificial Sequence: Synthetic oligonucleotide"
ctcacaacaacaccagcaaaa

SEQ ID NO: 34626 - DNA, 21 bp, Artificial Sequence
  source: /note="Description of Artificial Sequence: Synthetic oligonucleotide"
ctcacagtcggagcaacaatc

SEQ ID NO: 34627 - DNA, 21 bp, Artificial Sequence
  source: /note="Description of Artificial Sequence: Synthetic oligonucleotide"
ctcacagtccaagaaacacaa

SEQ ID NO: 34628 - DNA, 21 bp, Artificial Sequence
  source: /note="Description of Artificial Sequence: Synthetic oligonucleotide"
ctcacagtcagcgcagtcaaa

SEQ ID NO: 34629 - DNA, 21 bp, Artificial Sequence
  source: /note="Description of Artificial Sequence: Synthetic oligonucleotide"
ctcacagtcagcaacctccca

SEQ ID NO: 34630 - DNA, 21 bp, Artificial Sequence
  source: /note="Description of Artificial Sequence: Synthetic oligonucleotide"
ctcacagtcacatgggcagaa

SEQ ID NO: 34631 - DNA, 21 bp, Artificial Sequence
  source: /note="Description of Artificial Sequence: Synthetic oligonucleotide"
ctcacagtcgtcccaagcgga

SEQ ID NO: 34632 - DNA, 21 bp, Artificial Sequence
  source: /note="Description of Artificial Sequence: Synthetic oligonucleotide"
ctcacatacttcgtcgaagaa

SEQ ID NO: 34633 - DNA, 21 bp, Artificial Sequence
  source: /note="Description of Artificial Sequence: Synthetic oligonucleotide"
ctcacatacccaggaagccaa

SEQ ID NO: 34634 - DNA, 21 bp, Artificial Sequence
  source: /note="Description of Artificial Sequence: Synthetic oligonucleotide"
ctcacatacagaggaggagaa

SEQ ID NO: 34635 - DNA, 21 bp, Artificial Sequence
  source: /note="Description of Artificial Sequence: Synthetic oligonucleotide"
ctcacatacagcccacaaaca

SEQ ID NO: 34636 - DNA, 21 bp, Artificial Sequence
  source: /note="Description of Artificial Sequence: Synthetic oligonucleotide"
ctcacatacagcagaagcgac

SEQ ID NO: 34637 - DNA, 21 bp, Artificial Sequence
  source: /note="Description of Artificial Sequence: Synthetic oligonucleotide"
ctcgtcgcaaaaatgacacca

SEQ ID NO: 34638 - DNA, 21 bp, Artificial Sequence
  source: /note="Description of Artificial Sequence: Synthetic oligonucleotide"
ctcgtcgcaagaggaggagca

SEQ ID NO: 34639 - DNA, 21 bp, Artificial Sequence
  source: /note="Description of Artificial Sequence: Synthetic oligonucleotide"
ctcgtcgcaacacaagcacca

SEQ ID NO: 34640 - DNA, 21 bp, Artificial Sequence
  source: /note="Description of Artificial Sequence: Synthetic oligonucleotide"
ctcgtcgcagtcagcacaaca

SEQ ID NO: 34641 - DNA, 21 bp, Artificial Sequence
  source: /note="Description of Artificial Sequence: Synthetic oligonucleotide"
ctcgtcgacagcagaacaatg

SEQ ID NO: 34642 - DNA, 21 bp, Artificial Sequence
  source: /note="Description of Artificial Sequence: Synthetic oligonucleotide"
ctcgtcgaaggactcatcgac

SEQ ID NO: 34643 - DNA, 21 bp, Artificial Sequence
  source: /note="Description of Artificial Sequence: Synthetic oligonucleotide"
ctcgtcgaaaacagaagagaa

SEQ ID NO: 34644 - DNA, 21 bp, Artificial Sequence
  source: /note="Description of Artificial Sequence: Synthetic oligonucleotide"
ctcgtcgaaccaatgaaacac

SEQ ID NO: 34645 - DNA, 21 bp, Artificial Sequence
  source: /note="Description of Artificial Sequence: Synthetic oligonucleotide"
ctcgtcgaaacaaaaggaagc

SEQ ID NO: 34646 - DNA, 21 bp, Artificial Sequence
  source: /note="Description of Artificial Sequence: Synthetic oligonucleotide"
ctcgtcgaaacactcacacac

SEQ ID NO: 34647 - DNA, 21 bp, Artificial Sequence
  source: /note="Description of Artificial Sequence: Synthetic oligonucleotide"
ctcgtcggagaaagccacatc

SEQ ID NO: 34648 - DNA, 21 bp, Artificial Sequence
  source: /note="Description of Artificial Sequence: Synthetic oligonucleotide"
ctcgtcggacacccaacacca

SEQ ID NO: 34649 - DNA, 21 bp, Artificial Sequence
  source: /note="Description of Artificial Sequence: Synthetic oligonucleotide"
ctcgtcggacacacaggaagc

SEQ ID NO: 34650 - DNA, 21 bp, Artificial Sequence
  source: /note="Description of Artificial Sequence: Synthetic oligonucleotide"
ctcgtcggacaagtcgcagtc

SEQ ID NO: 34651 - DNA, 21 bp, Artificial Sequence
  source: /note="Description of Artificial Sequence: Synthetic oligonucleotide"
ctcgtcggaagagcatgctgc

SEQ ID NO: 34652 - DNA, 21 bp, Artificial Sequence
  source: /note="Description of Artificial Sequence: Synthetic oligonucleotide"
ctcgtcggaagactcagcaca

SEQ ID NO: 34653 - DNA, 21 bp, Artificial Sequence
  source: /note="Description of Artificial Sequence: Synthetic oligonucleotide"
ctcgtcggaagcccaccaagc

SEQ ID NO: 34654 - DNA, 21 bp, Artificial Sequence
  source: /note="Description of Artificial Sequence: Synthetic oligonucleotide"
ctcgtccacctcatgacagac

SEQ ID NO: 34655 - DNA, 21 bp, Artificial Sequence
  source: /note="Description of Artificial Sequence: Synthetic oligonucleotide"
ctcgtccacaacagaacaagc

SEQ ID NO: 34656 - DNA, 21 bp, Artificial Sequence
  source: /note="Description of Artificial Sequence: Synthetic oligonucleotide"
ctcgtccactacagcccagac

SEQ ID NO: 34657 - DNA, 21 bp, Artificial Sequence
  source: /note="Description of Artificial Sequence: Synthetic oligonucleotide"
ctcgtcatcccaggaccagga

SEQ ID NO: 34658 - DNA, 21 bp, Artificial Sequence
  source: /note="Description of Artificial Sequence: Synthetic oligonucleotide"
ctcgtcaaagaaagcccaaca

SEQ ID NO: 34659 - DNA, 21 bp, Artificial Sequence
  source: /note="Description of Artificial Sequence: Synthetic oligonucleotide"
ctcgtcaaaggaggaccaaac

SEQ ID NO: 34660 - DNA, 21 bp, Artificial Sequence
  source: /note="Description of Artificial Sequence: Synthetic oligonucleotide"
ctcgtcaaacaaacaacactc

SEQ ID NO: 34661 - DNA, 21 bp, Artificial Sequence
  source: /note="Description of Artificial Sequence: Synthetic oligonucleotide"
ctcgtcaaaagcgtcgaccaa

SEQ ID NO: 34662 - DNA, 21 bp, Artificial Sequence
  source: /note="Description of Artificial Sequence: Synthetic oligonucleotide"
ctcgtcctcggaccaccagca

SEQ ID NO: 34663 - DNA, 21 bp, Artificial Sequence
  source: /note="Description of Artificial Sequence: Synthetic oligonucleotide"
ctcgtcctcggaagcaaaagc

SEQ ID NO: 34664 - DNA, 21 bp, Artificial Sequence
  source: /note="Description of Artificial Sequence: Synthetic oligonucleotide"
ctcgtcctcaacaacgacgga

SEQ ID NO: 34665 - DNA, 21 bp, Artificial Sequence
  source: /note="Description of Artificial Sequence: Synthetic oligonucleotide"
ctcgtcctcccagcaagacaa

SEQ ID NO: 34666 - DNA, 21 bp, Artificial Sequence
  source: /note="Description of Artificial Sequence: Synthetic oligonucleotide"
ctcgtcctcccacaaaaaagc

SEQ ID NO: 34667 - DNA, 21 bp, Artificial Sequence
  source: /note="Description of Artificial Sequence: Synthetic oligonucleotide"
ctcgtcctcagcaacgcaagc

SEQ ID NO: 34668 - DNA, 21 bp, Artificial Sequence
  source: /note="Description of Artificial Sequence: Synthetic oligonucleotide"
ctcgtcatgagcccagcacca

SEQ ID NO: 34669 - DNA, 21 bp, Artificial Sequence
  source: /note="Description of Artificial Sequence: Synthetic oligonucleotide"
ctcgtcatgagcacaagagca

SEQ ID NO: 34670 - DNA, 21 bp, Artificial Sequence
  source: /note="Description of Artificial Sequence: Synthetic oligonucleotide"
ctcgtcatgacaagcggaagc

SEQ ID NO: 34671 - DNA, 21 bp, Artificial Sequence
  source: /note="Description of Artificial Sequence: Synthetic oligonucleotide"
ctcgtcaacgactgctgcaca

SEQ ID NO: 34672 - DNA, 21 bp, Artificial Sequence
  source: /note="Description of Artificial Sequence: Synthetic oligonucleotide"
ctcgtcaacgaaacaacaaga

SEQ ID NO: 34673 - DNA, 21 bp, Artificial Sequence
  source: /note="Description of Artificial Sequence: Synthetic oligonucleotide"
ctcgtcaacaaactcggacca

SEQ ID NO: 34674 - DNA, 21 bp, Artificial Sequence
  source: /note="Description of Artificial Sequence: Synthetic oligonucleotide"
ctcgtcaacaaaagctacaac

SEQ ID NO: 34675 - DNA, 21 bp, Artificial Sequence
  source: /note="Description of Artificial Sequence: Synthetic oligonucleotide"
ctcgtcaacccaggaacaaga

SEQ ID NO: 34676 - DNA, 21 bp, Artificial Sequence
  source: /note="Description of Artificial Sequence: Synthetic oligonucleotide"
ctcgtcaacagcaaagacagc

SEQ ID NO: 34677 - DNA, 21 bp, Artificial Sequence
  source: /note="Description of Artificial Sequence: Synthetic oligonucleotide"
ctcgtcaacacaccaacagaa

SEQ ID NO: 34678 - DNA, 21 bp, Artificial Sequence
  source: /note="Description of Artificial Sequence: Synthetic oligonucleotide"
ctcgtcccagcaagaagcgga

SEQ ID NO: 34679 - DNA, 21 bp, Artificial Sequence
  source: /note="Description of Artificial Sequence: Synthetic oligonucleotide"
ctcgtcccaggactcacagga

SEQ ID NO: 34680 - DNA, 21 bp, Artificial Sequence
  source: /note="Description of Artificial Sequence: Synthetic oligonucleotide"
ctcgtcccaggaatgatcaca

SEQ ID NO: 34681 - DNA, 21 bp, Artificial Sequence
  source: /note="Description of Artificial Sequence: Synthetic oligonucleotide"
ctcgtcccaggagtccacagc

SEQ ID NO: 34682 - DNA, 21 bp, Artificial Sequence
  source: /note="Description of Artificial Sequence: Synthetic oligonucleotide"
ctcgtcccacacagcaacttc

SEQ ID NO: 34683 - DNA, 21 bp, Artificial Sequence
  source: /note="Description of Artificial Sequence: Synthetic oligonucleotide"
ctcgtcccaaaacacatgaac

SEQ ID NO: 34684 - DNA, 21 bp, Artificial Sequence
  source: /note="Description of Artificial Sequence: Synthetic oligonucleotide"
ctcgtcccactcctcccagca

SEQ ID NO: 34685 - DNA, 21 bp, Artificial Sequence
  source: /note="Description of Artificial Sequence: Synthetic oligonucleotide"
ctcgtcccactcccacacagc

SEQ ID NO: 34686 - DNA, 21 bp, Artificial Sequence
  source: /note="Description of Artificial Sequence: Synthetic oligonucleotide"
ctcgtcccactctacacagaa

SEQ ID NO: 34687 - DNA, 21 bp, Artificial Sequence
  source: /note="Description of Artificial Sequence: Synthetic oligonucleotide"
ctcgtcccaaacttccaacca

SEQ ID NO: 34688 - DNA, 21 bp, Artificial Sequence
  source: /note="Description of Artificial Sequence: Synthetic oligonucleotide"
ctcgtcccaaacagcgcagaa

SEQ ID NO: 34689 - DNA, 21 bp, Artificial Sequence
  source: /note="Description of Artificial Sequence: Synthetic oligonucleotide"
ctcgtcccaagagcagcagac

SEQ ID NO: 34690 - DNA, 21 bp, Artificial Sequence
  source: /note="Description of Artificial Sequence: Synthetic oligonucleotide"
ctcgtcccaagaaacagcctc

SEQ ID NO: 34691 - DNA, 21 bp, Artificial Sequence
  source: /note="Description of Artificial Sequence: Synthetic oligonucleotide"
ctcgtcccaagcatccaaaca

SEQ ID NO: 34692 - DNA, 21 bp, Artificial Sequence
  source: /note="Description of Artificial Sequence: Synthetic oligonucleotide"
ctcgtcccaagcctcgaacaa

SEQ ID NO: 34693 - DNA, 21 bp, Artificial Sequence
  source: /note="Description of Artificial Sequence: Synthetic oligonucleotide"
ctcgtcccagtcagcctcagc

SEQ ID NO: 34694 - DNA, 21 bp, Artificial Sequence
  source: /note="Description of Artificial Sequence: Synthetic oligonucleotide"
ctcgtccaactcgacgtcgca

SEQ ID NO: 34695 - DNA, 21 bp, Artificial Sequence
  source: /note="Description of Artificial Sequence: Synthetic oligonucleotide"
ctcgtccaaagcctcggaatg

SEQ ID NO: 34696 - DNA, 21 bp, Artificial Sequence
  source: /note="Description of Artificial Sequence: Synthetic oligonucleotide"
ctcgtcagagcaatggacaca

SEQ ID NO: 34697 - DNA, 21 bp, Artificial Sequence
  source: /note="Description of Artificial Sequence: Synthetic oligonucleotide"
ctcgtcagaggagcaagccac

SEQ ID NO: 34698 - DNA, 21 bp, Artificial Sequence
  source: /note="Description of Artificial Sequence: Synthetic oligonucleotide"
ctcgtcagacacgacaacctc

SEQ ID NO: 34699 - DNA, 21 bp, Artificial Sequence
  source: /note="Description of Artificial Sequence: Synthetic oligonucleotide"
ctcgtcagaaacggactcagc

SEQ ID NO: 34700 - DNA, 21 bp, Artificial Sequence
  source: /note="Description of Artificial Sequence: Synthetic oligonucleotide"
ctcgtcagaccaagcccagca

SEQ ID NO: 34701 - DNA, 21 bp, Artificial Sequence
  source: /note="Description of Artificial Sequence: Synthetic oligonucleotide"
ctcgtcagcggacaccacatg

SEQ ID NO: 34702 - DNA, 21 bp, Artificial Sequence
  source: /note="Description of Artificial Sequence: Synthetic oligonucleotide"
ctcgtcagcggaaacagagtc

SEQ ID NO: 34703 - DNA, 21 bp, Artificial Sequence
  source: /note="Description of Artificial Sequence: Synthetic oligonucleotide"
ctcgtcagcggaacagacaga

SEQ ID NO: 34704 - DNA, 21 bp, Artificial Sequence
  source: /note="Description of Artificial Sequence: Synthetic oligonucleotide"
ctcgtcagccacccaagacca

SEQ ID NO: 34705 - DNA, 21 bp, Artificial Sequence
  source: /note="Description of Artificial Sequence: Synthetic oligonucleotide"
ctcgtcagccacagaagcgca

SEQ ID NO: 34706 - DNA, 21 bp, Artificial Sequence
  source: /note="Description of Artificial Sequence: Synthetic oligonucleotide"
ctcgtcagcaaagacgaaagc

SEQ ID NO: 34707 - DNA, 21 bp, Artificial Sequence
  source: /note="Description of Artificial Sequence: Synthetic oligonucleotide"
ctcgtcagcccagcaagacca

SEQ ID NO: 34708 - DNA, 21 bp, Artificial Sequence
  source: /note="Description of Artificial Sequence: Synthetic oligonucleotide"
ctcgtcagcccagaagaagga

SEQ ID NO: 34709 - DNA, 21 bp, Artificial Sequence
  source: /note="Description of Artificial Sequence: Synthetic oligonucleotide"
ctcgtcagcccaagcctcaca

SEQ ID NO: 34710 - DNA, 21 bp, Artificial Sequence
  source: /note="Description of Artificial Sequence: Synthetic oligonucleotide"
ctcgtcagcagcaaacaccca

SEQ ID NO: 34711 - DNA, 21 bp, Artificial Sequence
  source: /note="Description of Artificial Sequence: Synthetic oligonucleotide"
ctcgtcagcagcccaagaaca

SEQ ID NO: 34712 - DNA, 21 bp, Artificial Sequence
  source: /note="Description of Artificial Sequence: Synthetic oligonucleotide"
ctcgtcagcacaatgacagaa

SEQ ID NO: 34713 - DNA, 21 bp, Artificial Sequence
  source: /note="Description of Artificial Sequence: Synthetic oligonucleotide"
ctcgtcacagcaggaccactc

SEQ ID NO: 34714 - DNA, 21 bp, Artificial Sequence
  source: /note="Description of Artificial Sequence: Synthetic oligonucleotide"
ctcgtcacagcaccaacacca

SEQ ID NO: 34715 - DNA, 21 bp, Artificial Sequence
  source: /note="Description of Artificial Sequence: Synthetic oligonucleotide"
ctcgtcacagcacaacaccca

SEQ ID NO: 34716 - DNA, 21 bp, Artificial Sequence
  source: /note="Description of Artificial Sequence: Synthetic oligonucleotide"
ctcgtcacaggagacgcaagc

SEQ ID NO: 34717 - DNA, 21 bp, Artificial Sequence
  source: /note="Description of Artificial Sequence: Synthetic oligonucleotide"
ctcgtcacacacaactacgca

SEQ ID NO: 34718 - DNA, 21 bp, Artificial Sequence
  source: /note="Description of Artificial Sequence: Synthetic oligonucleotide"
ctcgtcacaatgagaccagtc

SEQ ID NO: 34719 - DNA, 21 bp, Artificial Sequence
  source: /note="Description of Artificial Sequence: Synthetic oligonucleotide"
ctcgtcacaaacgcacacagc

SEQ ID NO: 34720 - DNA, 21 bp, Artificial Sequence
  source: /note="Description of Artificial Sequence: Synthetic oligonucleotide"
ctcgtcacaccaggagacaga

SEQ ID NO: 34721 - DNA, 21 bp, Artificial Sequence
  source: /note="Description of Artificial Sequence: Synthetic oligonucleotide"
ctcgtcacacaaagcaacgaa

SEQ ID NO: 34722 - DNA, 21 bp, Artificial Sequence
  source: /note="Description of Artificial Sequence: Synthetic oligonucleotide"
ctcgtcacatacacaccaatg

SEQ ID NO: 34723 - DNA, 21 bp, Artificial Sequence
  source: /note="Description of Artificial Sequence: Synthetic oligonucleotide"
ctcgtcgtcgcagcacacctc

SEQ ID NO: 34724 - DNA, 21 bp, Artificial Sequence
  source: /note="Description of Artificial Sequence: Synthetic oligonucleotide"
ctcgtcgtcgcagaaagaatc

SEQ ID NO: 34725 - DNA, 21 bp, Artificial Sequence
  source: /note="Description of Artificial Sequence: Synthetic oligonucleotide"
ctcgtcgtcgacgaaatgaca

SEQ ID NO: 34726 - DNA, 21 bp, Artificial Sequence
  source: /note="Description of Artificial Sequence: Synthetic oligonucleotide"
ctcgtcgtcaacagaatggac

SEQ ID NO: 34727 - DNA, 21 bp, Artificial Sequence
  source: /note="Description of Artificial Sequence: Synthetic oligonucleotide"
ctcgtcgtcccaggaaacgga

SEQ ID NO: 34728 - DNA, 21 bp, Artificial Sequence
  source: /note="Description of Artificial Sequence: Synthetic oligonucleotide"
ctcgtctacggacacgaccac

SEQ ID NO: 34729 - DNA, 21 bp, Artificial Sequence
  source: /note="Description of Artificial Sequence: Synthetic oligonucleotide"
ctcgtctacacaagcacaagc

SEQ ID NO: 34730 - DNA, 21 bp, Artificial Sequence
  source: /note="Description of Artificial Sequence: Synthetic oligonucleotide"
ctctgggacctcggaaaccca

SEQ ID NO: 34731 - DNA, 21 bp, Artificial Sequence
  source: /note="Description of Artificial Sequence: Synthetic oligonucleotide"
ctctgggaaacaagcacagac

SEQ ID NO: 34732 - DNA, 21 bp, Artificial Sequence
  source: /note="Description of Artificial Sequence: Synthetic oligonucleotide"
ctctggggagacggaacactc

SEQ ID NO: 34733 - DNA, 21 bp, Artificial Sequence
  source: /note="Description of Artificial Sequence: Synthetic oligonucleotide"
ctctggaacaaaccagacgac

SEQ ID NO: 34734 - DNA, 21 bp, Artificial Sequence
  source: /note="Description of Artificial Sequence: Synthetic oligonucleotide"
ctctggaacagcaacacagca

SEQ ID NO: 34735 - DNA, 21 bp, Artificial Sequence
  source: /note="Description of Artificial Sequence: Synthetic oligonucleotide"
ctctggcaaagcgaagtcgac

SEQ ID NO: 34736 - DNA, 21 bp, Artificial Sequence
  source: /note="Description of Artificial Sequence: Synthetic oligonucleotide"
ctctggagagcagacgacgca

SEQ ID NO: 34737 - DNA, 21 bp, Artificial Sequence
  source: /note="Description of Artificial Sequence: Synthetic oligonucleotide"
ctctggagaagcagcacaaca

SEQ ID NO: 34738 - DNA, 21 bp, Artificial Sequence
  source: /note="Description of Artificial Sequence: Synthetic oligonucleotide"
ctctggacagcagaaagagac

SEQ ID NO: 34739 - DNA, 21 bp, Artificial Sequence
  source: /note="Description of Artificial Sequence: Synthetic oligonucleotide"
ctctggacaggaagcggacca

SEQ ID NO: 34740 - DNA, 21 bp, Artificial Sequence
  source: /note="Description of Artificial Sequence: Synthetic oligonucleotide"
ctctggacaaaccaaccaagc

SEQ ID NO: 34741 - DNA, 21 bp, Artificial Sequence
  source: /note="Description of Artificial Sequence: Synthetic oligonucleotide"
ctctacgcaaacagcaaacca

SEQ ID NO: 34742 - DNA, 21 bp, Artificial Sequence
  source: /note="Description of Artificial Sequence: Synthetic oligonucleotide"
ctctacgacctcagaggagca

SEQ ID NO: 34743 - DNA, 21 bp, Artificial Sequence
  source: /note="Description of Artificial Sequence: Synthetic oligonucleotide"
ctctacgacagccaagacaca

SEQ ID NO: 34744 - DNA, 21 bp, Artificial Sequence
  source: /note="Description of Artificial Sequence: Synthetic oligonucleotide"
ctctacgacacaagcctcctc

SEQ ID NO: 34745 - DNA, 21 bp, Artificial Sequence
  source: /note="Description of Artificial Sequence: Synthetic oligonucleotide"
ctctacgaacacagcagccca

SEQ ID NO: 34746 - DNA, 21 bp, Artificial Sequence
  source: /note="Description of Artificial Sequence: Synthetic oligonucleotide"
ctctacgaatacccaagcgga

SEQ ID NO: 34747 - DNA, 21 bp, Artificial Sequence
  source: /note="Description of Artificial Sequence: Synthetic oligonucleotide"
ctctacggaagcctcgtccca

SEQ ID NO: 34748 - DNA, 21 bp, Artificial Sequence
  source: /note="Description of Artificial Sequence: Synthetic oligonucleotide"
ctctacggaacaagcgcaatc

SEQ ID NO: 34749 - DNA, 21 bp, Artificial Sequence
  source: /note="Description of Artificial Sequence: Synthetic oligonucleotide"
ctctacaaaagcccagaaaca

SEQ ID NO: 34750 - DNA, 21 bp, Artificial Sequence
  source: /note="Description of Artificial Sequence: Synthetic oligonucleotide"
ctctacctcggaagcaaagac

SEQ ID NO: 34751 - DNA, 21 bp, Artificial Sequence
  source: /note="Description of Artificial Sequence: Synthetic oligonucleotide"
ctctacctccaaaacgacaaa

SEQ ID NO: 34752 - DNA, 21 bp, Artificial Sequence
  source: /note="Description of Artificial Sequence: Synthetic oligonucleotide"
ctctacctcacaagcctcgac

SEQ ID NO: 34753 - DNA, 21 bp, Artificial Sequence
  source: /note="Description of Artificial Sequence: Synthetic oligonucleotide"
ctctacaacgacttcagcttc

SEQ ID NO: 34754 - DNA, 21 bp, Artificial Sequence
  source: /note="Description of Artificial Sequence: Synthetic oligonucleotide"
ctctacaacagcagcgacagc

SEQ ID NO: 34755 - DNA, 21 bp, Artificial Sequence
  source: /note="Description of Artificial Sequence: Synthetic oligonucleotide"
ctctacccacacgcaccaagc

SEQ ID NO: 34756 - DNA, 21 bp, Artificial Sequence
  source: /note="Description of Artificial Sequence: Synthetic oligonucleotide"
ctctacccactccaaacagca

SEQ ID NO: 34757 - DNA, 21 bp, Artificial Sequence
  source: /note="Description of Artificial Sequence: Synthetic oligonucleotide"
ctctaccaaggaagcaacagc

SEQ ID NO: 34758 - DNA, 21 bp, Artificial Sequence
  source: /note="Description of Artificial Sequence: Synthetic oligonucleotide"
ctctaccaaggatacagcgca

SEQ ID NO: 34759 - DNA, 21 bp, Artificial Sequence
  source: /note="Description of Artificial Sequence: Synthetic oligonucleotide"
ctctacagcgcagcaagcaaa

SEQ ID NO: 34760 - DNA, 21 bp, Artificial Sequence
  source: /note="Description of Artificial Sequence: Synthetic oligonucleotide"
ctctacagcgaagtcggactc

SEQ ID NO: 34761 - DNA, 21 bp, Artificial Sequence
  source: /note="Description of Artificial Sequence: Synthetic oligonucleotide"
ctctacagcggaacaatccca

SEQ ID NO: 34762 - DNA, 21 bp, Artificial Sequence
  source: /note="Description of Artificial Sequence: Synthetic oligonucleotide"
ctctacagcaacccaaacgtc

SEQ ID NO: 34763 - DNA, 21 bp, Artificial Sequence
  source: /note="Description of Artificial Sequence: Synthetic oligonucleotide"
ctctacagcccactcagcaac

SEQ ID NO: 34764 - DNA, 21 bp, Artificial Sequence
  source: /note="Description of Artificial Sequence: Synthetic oligonucleotide"
ctctacacagcaacagcaaaa

SEQ ID NO: 34765 - DNA, 21 bp, Artificial Sequence
  source: /note="Description of Artificial Sequence: Synthetic oligonucleotide"
ctctacacagacagcgcattc

SEQ ID NO: 34766 - DNA, 21 bp, Artificial Sequence
  source: /note="Description of Artificial Sequence: Synthetic oligonucleotide"
ctctacacaggactcggaaca

SEQ ID NO: 34767 - DNA, 21 bp, Artificial Sequence
  source: /note="Description of Artificial Sequence: Synthetic oligonucleotide"
ctctacacaaaaaacgaagga

SEQ ID NO: 34768 - DNA, 21 bp, Artificial Sequence
  source: /note="Description of Artificial Sequence: Synthetic oligonucleotide"
ctctacacaaaaagcgtccca

SEQ ID NO: 34769 - DNA, 21 bp, Artificial Sequence
  source: /note="Description of Artificial Sequence: Synthetic oligonucleotide"
ctctacacaccaaacggagca

SEQ ID NO: 34770 - DNA, 21 bp, Artificial Sequence
  source: /note="Description of Artificial Sequence: Synthetic oligonucleotide"
ctctacacaagcctcccacaa

SEQ ID NO: 34771 - DNA, 21 bp, Artificial Sequence
  source: /note="Description of Artificial Sequence: Synthetic oligonucleotide"
ctctacacaagcagcggaagc

SEQ ID NO: 34772 - DNA, 21 bp, Artificial Sequence
  source: /note="Description of Artificial Sequence: Synthetic oligonucleotide"
ctctacacagtcacaagcgga

SEQ ID NO: 34773 - DNA, 21 bp, Artificial Sequence
  source: /note="Description of Artificial Sequence: Synthetic oligonucleotide"
ctctacgtcagcgaaaaacca

SEQ ID NO: 34774 - DNA, 21 bp, Artificial Sequence
  source: /note="Description of Artificial Sequence: Synthetic oligonucleotide"
ctctactacccaagcacagaa

SEQ ID NO: 34775 - DNA, 21 bp, Artificial Sequence
  source: /note="Description of Artificial Sequence: Synthetic oligonucleotide"
atggcagcactcaacgacttc

SEQ ID NO: 34776 - DNA, 21 bp, Artificial Sequence
  source: /note="Description of Artificial Sequence: Synthetic oligonucleotide"
atggcagcacaagactacgca

SEQ ID NO: 34777 - DNA, 21 bp, Artificial Sequence
  source: /note="Description of Artificial Sequence: Synthetic oligonucleotide"
atggcagcaagaacaagcaac

SEQ ID NO: 34778 - DNA, 21 bp, Artificial Sequence
  source: /note="Description of Artificial Sequence: Synthetic oligonucleotide"
atggcagcaagcaaaacattc

SEQ ID NO: 34779 - DNA, 21 bp, Artificial Sequence
  source: /note="Description of Artificial Sequence: Synthetic oligonucleotide"
atggcagaattcgtccacaga

SEQ ID NO: 34780 - DNA, 21 bp, Artificial Sequence
  source: /note="Description of Artificial Sequence: Synthetic oligonucleotide"
atggcaggaaaagcaagccac

SEQ ID NO: 34781 - DNA, 21 bp, Artificial Sequence
  source: /note="Description of Artificial Sequence: Synthetic oligonucleotide"
atggcaggaaacctcgtcaca

SEQ ID NO: 34782 - DNA, 21 bp, Artificial Sequence
  source: /note="Description of Artificial Sequence: Synthetic oligonucleotide"
atggcaaaactcacagtcagc

SEQ ID NO: 34783 - DNA, 21 bp, Artificial Sequence
  source: /note="Description of Artificial Sequence: Synthetic oligonucleotide"
atggcactccaaggaagcctc

SEQ ID NO: 34784 - DNA, 21 bp, Artificial Sequence
  source: /note="Description of Artificial Sequence: Synthetic oligonucleotide"
atggcactcagactcgtcaac

SEQ ID NO: 34785 - DNA, 21 bp, Artificial Sequence
  source: /note="Description of Artificial Sequence: Synthetic oligonucleotide"
atggcaaacatgagcagccca

SEQ ID NO: 34786 - DNA, 21 bp, Artificial Sequence
  source: /note="Description of Artificial Sequence: Synthetic oligonucleotide"
atggcaccagtcagagtccca

SEQ ID NO: 34787 - DNA, 21 bp, Artificial Sequence
  source: /note="Description of Artificial Sequence: Synthetic oligonucleotide"
atggcaagagcactcccacca

SEQ ID NO: 34788 - DNA, 21 bp, Artificial Sequence
  source: /note="Description of Artificial Sequence: Synthetic oligonucleotide"
atggcaagagacgtcgacaga

SEQ ID NO: 34789 - DNA, 21 bp, Artificial Sequence
  source: /note="Description of Artificial Sequence: Synthetic oligonucleotide"
atggcaagagaaacaacatac

SEQ ID NO: 34790 - DNA, 21 bp, Artificial Sequence
  source: /note="Description of Artificial Sequence: Synthetic oligonucleotide"
atggcaagcgcaacaccagtc

SEQ ID NO: 34791 - DNA, 21 bp, Artificial Sequence
  source: /note="Description of Artificial Sequence: Synthetic oligonucleotide"
atggcaagcggacaaagcctc

SEQ ID NO: 34792 - DNA, 21 bp, Artificial Sequence
  source: /note="Description of Artificial Sequence: Synthetic oligonucleotide"
atggcaagccacgtcccagtc

SEQ ID NO: 34793 - DNA, 21 bp, Artificial Sequence
  source: /note="Description of Artificial Sequence: Synthetic oligonucleotide"
atggcaagcccatacagcagc

SEQ ID NO: 34794 - DNA, 21 bp, Artificial Sequence
  source: /note="Description of Artificial Sequence: Synthetic oligonucleotide"
atggcaagccaaatcagacca

SEQ ID NO: 34795 - DNA, 21 bp, Artificial Sequence
  source: /note="Description of Artificial Sequence: Synthetic oligonucleotide"
atggcaagcagctacaacgac

SEQ ID NO: 34796 - DNA, 21 bp, Artificial Sequence
  source: /note="Description of Artificial Sequence: Synthetic oligonucleotide"
atggcaagcacagaaagcaga

SEQ ID NO: 34797 - DNA, 21 bp, Artificial Sequence
  source: /note="Description of Artificial Sequence: Synthetic oligonucleotide"
atggcaacagcaccactccac

SEQ ID NO: 34798 - DNA, 21 bp, Artificial Sequence
  source: /note="Description of Artificial Sequence: Synthetic oligonucleotide"
atggcaacagacagaagatac

SEQ ID NO: 34799 - DNA, 21 bp, Artificial Sequence
  source: /note="Description of Artificial Sequence: Synthetic oligonucleotide"
atggcaacacacgtcatggga

SEQ ID NO: 34800 - DNA, 21 bp, Artificial Sequence
  source: /note="Description of Artificial Sequence: Synthetic oligonucleotide"
atggcagtcaaagtcggagaa

SEQ ID NO: 34801 - DNA, 21 bp, Artificial Sequence
  source: /note="Description of Artificial Sequence: Synthetic oligonucleotide"
atggcataccaaccaacactc

SEQ ID NO: 34802 - DNA, 21 bp, Artificial Sequence
  source: /note="Description of Artificial Sequence: Synthetic oligonucleotide"
atggcataccaacaaatccca

SEQ ID NO: 34803 - DNA, 21 bp, Artificial Sequence
  source: /note="Description of Artificial Sequence: Synthetic oligonucleotide"
atgtgcgacagcgacagacca

SEQ ID NO: 34804 - DNA, 21 bp, Artificial Sequence
  source: /note="Description of Artificial Sequence: Synthetic oligonucleotide"
atggacgacagagcaggattc

SEQ ID NO: 34805 - DNA, 21 bp, Artificial Sequence
  source: /note="Description of Artificial Sequence: Synthetic oligonucleotide"
atggacgaaccagaaccaagc

SEQ ID NO: 34806 - DNA, 21 bp, Artificial Sequence
  source: /note="Description of Artificial Sequence: Synthetic oligonucleotide"
atggacaaaatcctcacaagc

SEQ ID NO: 34807 - DNA, 21 bp, Artificial Sequence
  source: /note="Description of Artificial Sequence: Synthetic oligonucleotide"
atggacctcacaggaccagtc

SEQ ID NO: 34808 - DNA, 21 bp, Artificial Sequence
  source: /note="Description of Artificial Sequence: Synthetic oligonucleotide"
atggacatgggaggaagccca

SEQ ID NO: 34809 - DNA, 21 bp, Artificial Sequence
  source: /note="Description of Artificial Sequence: Synthetic oligonucleotide"
atggacaacctcagacaaagc

SEQ ID NO: 34810 - DNA, 21 bp, Artificial Sequence
  source: /note="Description of Artificial Sequence: Synthetic oligonucleotide"
atggacagagcactccacgga

SEQ ID NO: 34811 - DNA, 21 bp, Artificial Sequence
  source: /note="Description of Artificial Sequence: Synthetic oligonucleotide"
atggacagaatgacactcatg

SEQ ID NO: 34812 - DNA, 21 bp, Artificial Sequence
  source: /note="Description of Artificial Sequence: Synthetic oligonucleotide"
atggacagaaacttcgtcatg

SEQ ID NO: 34813 - DNA, 21 bp, Artificial Sequence
  source: /note="Description of Artificial Sequence: Synthetic oligonucleotide"
atggacagaccaagcacaagc

SEQ ID NO: 34814 - DNA, 21 bp, Artificial Sequence
  source: /note="Description of Artificial Sequence: Synthetic oligonucleotide"
atggacagcgcagactacgaa

SEQ ID NO: 34815 - DNA, 21 bp, Artificial Sequence
  source: /note="Description of Artificial Sequence: Synthetic oligonucleotide"
atggacagcctcccaccacca

SEQ ID NO: 34816 - DNA, 21 bp, Artificial Sequence
  source: /note="Description of Artificial Sequence: Synthetic oligonucleotide"
atggacagcagaacactcctc

SEQ ID NO: 34817 - DNA, 21 bp, Artificial Sequence
  source: /note="Description of Artificial Sequence: Synthetic oligonucleotide"
atggacagcacaagcccacca

SEQ ID NO: 34818 - DNA, 21 bp, Artificial Sequence
  source: /note="Description of Artificial Sequence: Synthetic oligonucleotide"
atggacgtcagccacggaagc

SEQ ID NO: 34819 - DNA, 21 bp, Artificial Sequence
  source: /note="Description of Artificial Sequence: Synthetic oligonucleotide"
atggaattcggaacaacacca

SEQ ID NO: 34820 - DNA, 21 bp, Artificial Sequence
  source: /note="Description of Artificial Sequence: Synthetic oligonucleotide"
atggaattcgtcagcacattc

SEQ ID NO: 34821 - DNA, 21 bp, Artificial Sequence
  source: /note="Description of Artificial Sequence: Synthetic oligonucleotide"
atggaaggaagcggaagaaac

SEQ ID NO: 34822 - DNA, 21 bp, Artificial Sequence
  source: /note="Description of Artificial Sequence: Synthetic oligonucleotide"
atggaaatcgaaagcctcaac

SEQ ID NO: 34823 - DNA, 21 bp, Artificial Sequence
  source: /note="Description of Artificial Sequence: Synthetic oligonucleotide"
atggaaatcacaagagcacca

SEQ ID NO: 34824 - DNA, 21 bp, Artificial Sequence
  source: /note="Description of Artificial Sequence: Synthetic oligonucleotide"
atggaaaaagcaacaccaagc

SEQ ID NO: 34825 - DNA, 21 bp, Artificial Sequence
  source: /note="Description of Artificial Sequence: Synthetic oligonucleotide"
atggaaaaactcaaacaaaac

SEQ ID NO: 34826 - DNA, 21 bp, Artificial Sequence
  source: /note="Description of Artificial Sequence: Synthetic oligonucleotide"
atggaactcatcgaaggacca

SEQ ID NO: 34827 - DNA, 21 bp, Artificial Sequence
  source: /note="Description of Artificial Sequence: Synthetic oligonucleotide"
atggaaaacacaacaagaagc

SEQ ID NO: 34828 - DNA, 21 bp, Artificial Sequence
  source: /note="Description of Artificial Sequence: Synthetic oligonucleotide"
atggaaccaaaaagaagctac

SEQ ID NO: 34829 - DNA, 21 bp, Artificial Sequence
  source: /note="Description of Artificial Sequence: Synthetic oligonucleotide"
atggaaccaccaatcaaccca

SEQ ID NO: 34830 - DNA, 21 bp, Artificial Sequence
  source: /note="Description of Artificial Sequence: Synthetic oligonucleotide"
atggaaagaacactctgcaac

SEQ ID NO: 34831 - DNA, 21 bp, Artificial Sequence
  source: /note="Description of Artificial Sequence: Synthetic oligonucleotide"
atggaaagcctcggactcgca

SEQ ID NO: 34832 - DNA, 21 bp, Artificial Sequence
  source: /note="Description of Artificial Sequence: Synthetic oligonucleotide"
atggaaagcaaccacagcaga

SEQ ID NO: 34833 - DNA, 21 bp, Artificial Sequence
  source: /note="Description of Artificial Sequence: Synthetic oligonucleotide"
atggaaagcagaccaagctac

SEQ ID NO: 34834 - DNA, 21 bp, Artificial Sequence
  source: /note="Description of Artificial Sequence: Synthetic oligonucleotide"
atggaaacaaaaagcatcagc

SEQ ID NO: 34835 - DNA, 21 bp, Artificial Sequence
  source: /note="Description of Artificial Sequence: Synthetic oligonucleotide"
atggaaacaaactggccagca

SEQ ID NO: 34836 - DNA, 21 bp, Artificial Sequence
  source: /note="Description of Artificial Sequence: Synthetic oligonucleotide"
atggaaacaagccacagaatg

SEQ ID NO: 34837 - DNA, 21 bp, Artificial Sequence
  source: /note="Description of Artificial Sequence: Synthetic oligonucleotide"
atgttcggaaacgcagaatac

SEQ ID NO: 34838 - DNA, 21 bp, Artificial Sequence
  source: /note="Description of Artificial Sequence: Synthetic oligonucleotide"
atgttcggaacaagccaagac

SEQ ID NO: 34839 - DNA, 21 bp, Artificial Sequence
  source: /note="Description of Artificial Sequence: Synthetic oligonucleotide"
atgttcctcaaagtcagccca

SEQ ID NO: 34840 - DNA, 21 bp, Artificial Sequence
  source: /note="Description of Artificial Sequence: Synthetic oligonucleotide"
atgttcagagtcgtcagcgac

SEQ ID NO: 34841 - DNA, 21 bp, Artificial Sequence
  source: /note="Description of Artificial Sequence: Synthetic oligonucleotide"
atgttcagcagcacaaaacca

SEQ ID NO: 34842 - DNA, 21 bp, Artificial Sequence
  source: /note="Description of Artificial Sequence: Synthetic oligonucleotide"
atgttcacagacagcagaagc

SEQ ID NO: 34843 - DNA, 21 bp, Artificial Sequence
  source: /note="Description of Artificial Sequence: Synthetic oligonucleotide"
atgttcgtcaacgaactcaaa

SEQ ID NO: 34844 - DNA, 21 bp, Artificial Sequence
  source: /note="Description of Artificial Sequence: Synthetic oligonucleotide"
atgggagcaacacacccaaga

SEQ ID NO: 34845 - DNA, 21 bp, Artificial Sequence
  source: /note="Description of Artificial Sequence: Synthetic oligonucleotide"
atgggagacagaagcagaaac

SEQ ID NO: 34846 - DNA, 21 bp, Artificial Sequence
  source: /note="Description of Artificial Sequence: Synthetic oligonucleotide"
atgggagactacacaacaaaa

SEQ ID NO: 34847 - DNA, 21 bp, Artificial Sequence
  source: /note="Description of Artificial Sequence: Synthetic oligonucleotide"
atgggagaaagactcttcagc

SEQ ID NO: 34848 - DNA, 21 bp, Artificial Sequence
  source: /note="Description of Artificial Sequence: Synthetic oligonucleotide"
atgggaggacacggaagaaca

SEQ ID NO: 34849 - DNA, 21 bp, Artificial Sequence
  source: /note="Description of Artificial Sequence: Synthetic oligonucleotide"
atgggaggaaacagcccattc

SEQ ID NO: 34850 - DNA, 21 bp, Artificial Sequence
  source: /note="Description of Artificial Sequence: Synthetic oligonucleotide"
atgggaggaacaagaggaaca

SEQ ID NO: 34851 - DNA, 21 bp, Artificial Sequence
  source: /note="Description of Artificial Sequence: Synthetic oligonucleotide"
atgggaggaacatactgcaga

SEQ ID NO: 34852 - DNA, 21 bp, Artificial Sequence
  source: /note="Description of Artificial Sequence: Synthetic oligonucleotide"
atgggacacagcgacacacca

SEQ ID NO: 34853 - DNA, 21 bp, Artificial Sequence
  source: /note="Description of Artificial Sequence: Synthetic oligonucleotide"
atgggacacacaccaagagaa

SEQ ID NO: 34854 - DNA, 21 bp, Artificial Sequence
  source: /note="Description of Artificial Sequence: Synthetic oligonucleotide"
atgggaaaaacagcagaaaga

SEQ ID NO: 34855 - DNA, 21 bp, Artificial Sequence
  source: /note="Description of Artificial Sequence: Synthetic oligonucleotide"
atgggactcggaagcagcaac

SEQ ID NO: 34856 - DNA, 21 bp, Artificial Sequence
  source: /note="Description of Artificial Sequence: Synthetic oligonucleotide"
atgggactcagaccagaagga

SEQ ID NO: 34857 - DNA, 21 bp, Artificial Sequence
  source: /note="Description of Artificial Sequence: Synthetic oligonucleotide"
atgggaatgcacggaacaagc

SEQ ID NO: 34858 - DNA, 21 bp, Artificial Sequence
  source: /note="Description of Artificial Sequence: Synthetic oligonucleotide"
atgggaaaccacgcaggaagc

SEQ ID NO: 34859 - DNA, 21 bp, Artificial Sequence
  source: /note="Description of Artificial Sequence: Synthetic oligonucleotide"
atgggaaacagcctcaaacaa

SEQ ID NO: 34860 - DNA, 21 bp, Artificial Sequence
  source: /note="Description of Artificial Sequence: Synthetic oligonucleotide"
atgggaccagacggaagcatc

SEQ ID NO: 34861 - DNA, 21 bp, Artificial Sequence
  source: /note="Description of Artificial Sequence: Synthetic oligonucleotide"
atgggaccaatcacaccacaa

SEQ ID NO: 34862 - DNA, 21 bp, Artificial Sequence
  source: /note="Description of Artificial Sequence: Synthetic oligonucleotide"
atgggacaaaacatggcactc

SEQ ID NO: 34863 - DNA, 21 bp, Artificial Sequence
  source: /note="Description of Artificial Sequence: Synthetic oligonucleotide"
atgggaagagacgaaccagga

SEQ ID NO: 34864 - DNA, 21 bp, Artificial Sequence
  source: /note="Description of Artificial Sequence: Synthetic oligonucleotide"
atgggaagcggatacacaatg

SEQ ID NO: 34865 - DNA, 21 bp, Artificial Sequence
  source: /note="Description of Artificial Sequence: Synthetic oligonucleotide"
atgggaagcacaatcgcactc

SEQ ID NO: 34866 - DNA, 21 bp, Artificial Sequence
  source: /note="Description of Artificial Sequence: Synthetic oligonucleotide"
atgggaagcgtccacaacctc

SEQ ID NO: 34867 - DNA, 21 bp, Artificial Sequence
  source: /note="Description of Artificial Sequence: Synthetic oligonucleotide"
atgggaagcgtcatcggaaca

SEQ ID NO: 34868 - DNA, 21 bp, Artificial Sequence
  source: /note="Description of Artificial Sequence: Synthetic oligonucleotide"
atgggaacaacacacacaagc

SEQ ID NO: 34869 - DNA, 21 bp, Artificial Sequence
  source: /note="Description of Artificial Sequence: Synthetic oligonucleotide"
atgggaacaacaccaacactc

SEQ ID NO: 34870 - DNA, 21 bp, Artificial Sequence
  source: /note="Description of Artificial Sequence: Synthetic oligonucleotide"
atgggagtcagaaacgcagca

SEQ ID NO: 34871 - DNA, 21 bp, Artificial Sequence
  source: /note="Description of Artificial Sequence: Synthetic oligonucleotide"
atgggatacctcacaggagaa

SEQ ID NO: 34872 - DNA, 21 bp, Artificial Sequence
  source: /note="Description of Artificial Sequence: Synthetic oligonucleotide"
atgcacgacgcagacaaacca

SEQ ID NO: 34873 - DNA, 21 bp, Artificial Sequence
  source: /note="Description of Artificial Sequence: Synthetic oligonucleotide"
atgcacgacttcccagaactc

SEQ ID NO: 34874 - DNA, 21 bp, Artificial Sequence
  source: /note="Description of Artificial Sequence: Synthetic oligonucleotide"
atgcacgacagcccacaagca

SEQ ID NO: 34875 - DNA, 21 bp, Artificial Sequence
  source: /note="Description of Artificial Sequence: Synthetic oligonucleotide"
atgcacgaaagcctctaccca

SEQ ID NO: 34876 - DNA, 21 bp, Artificial Sequence
  source: /note="Description of Artificial Sequence: Synthetic oligonucleotide"
atgcacttcagcgcagaacca

SEQ ID NO: 34877 - DNA, 21 bp, Artificial Sequence
  source: /note="Description of Artificial Sequence: Synthetic oligonucleotide"
atgcaccacgcaacagcacca

SEQ ID NO: 34878 - DNA, 21 bp, Artificial Sequence
  source: /note="Description of Artificial Sequence: Synthetic oligonucleotide"
atgcacccagcaccactcaga

SEQ ID NO: 34879 - DNA, 21 bp, Artificial Sequence
  source: /note="Description of Artificial Sequence: Synthetic oligonucleotide"
atgcacccaggaggaggaagc

SEQ ID NO: 34880 - DNA, 21 bp, Artificial Sequence
  source: /note="Description of Artificial Sequence: Synthetic oligonucleotide"
atgcaccaaagagacggagca

SEQ ID NO: 34881 - DNA, 21 bp, Artificial Sequence
  source: /note="Description of Artificial Sequence: Synthetic oligonucleotide"
atgcaccaaacaagcatggga

SEQ ID NO: 34882 - DNA, 21 bp, Artificial Sequence
  source: /note="Description of Artificial Sequence: Synthetic oligonucleotide"
atgcacagcaaaggagcaaac

SEQ ID NO: 34883 - DNA, 21 bp, Artificial Sequence
  source: /note="Description of Artificial Sequence: Synthetic oligonucleotide"
atgcacagcccacaaacacac

SEQ ID NO: 34884 - DNA, 21 bp, Artificial Sequence
  source: /note="Description of Artificial Sequence: Synthetic oligonucleotide"
atgcacagcagcccactcgac

SEQ ID NO: 34885 - DNA, 21 bp, Artificial Sequence
  source: /note="Description of Artificial Sequence: Synthetic oligonucleotide"
atgcacagcacagtcccagca

SEQ ID NO: 34886 - DNA, 21 bp, Artificial Sequence
  source: /note="Description of Artificial Sequence: Synthetic oligonucleotide"
atgatcgacagagtcagaaca

SEQ ID NO: 34887 - DNA, 21 bp, Artificial Sequence
  source: /note="Description of Artificial Sequence: Synthetic oligonucleotide"
atgatcgaaatcaaagaactc

SEQ ID NO: 34888 - DNA, 21 bp, Artificial Sequence
  source: /note="Description of Artificial Sequence: Synthetic oligonucleotide"
atgatcgaagtcctcccaagc

SEQ ID NO: 34889 - DNA, 21 bp, Artificial Sequence
  source: /note="Description of Artificial Sequence: Synthetic oligonucleotide"
atgatcggagacgcaccagca

SEQ ID NO: 34890 - DNA, 21 bp, Artificial Sequence
  source: /note="Description of Artificial Sequence: Synthetic oligonucleotide"
atgatcggaaaaagcacagac

SEQ ID NO: 34891 - DNA, 21 bp, Artificial Sequence
  source: /note="Description of Artificial Sequence: Synthetic oligonucleotide"
atgatcaaaaaagactacgca

SEQ ID NO: 34892 - DNA, 21 bp, Artificial Sequence
  source: /note="Description of Artificial Sequence: Synthetic oligonucleotide"
atgatcaaaacaaacagcgtc

SEQ ID NO: 34893 - DNA, 21 bp, Artificial Sequence
  source: /note="Description of Artificial Sequence: Synthetic oligonucleotide"
atgatcaacgcaaacacaaac

SEQ ID NO: 34894 - DNA, 21 bp, Artificial Sequence
  source: /note="Description of Artificial Sequence: Synthetic oligonucleotide"
atgatcccagtcagaccagac

SEQ ID NO: 34895 - DNA, 21 bp, Artificial Sequence
  source: /note="Description of Artificial Sequence: Synthetic oligonucleotide"
atgatcagcgaaccactcaca

SEQ ID NO: 34896 - DNA, 21 bp, Artificial Sequence
  source: /note="Description of Artificial Sequence: Synthetic oligonucleotide"
atgatcagcggaagaacaaca

SEQ ID NO: 34897 - DNA, 21 bp, Artificial Sequence
  source: /note="Description of Artificial Sequence: Synthetic oligonucleotide"
atgatcagccaccaaccacca

SEQ ID NO: 34898 - DNA, 21 bp, Artificial Sequence
  source: /note="Description of Artificial Sequence: Synthetic oligonucleotide"
atgatcagcatccaacaaaca

SEQ ID NO: 34899 - DNA, 21 bp, Artificial Sequence
  source: /note="Description of Artificial Sequence: Synthetic oligonucleotide"
atgatcagcagcatgctcgga

SEQ ID NO: 34900 - DNA, 21 bp, Artificial Sequence
  source: /note="Description of Artificial Sequence: Synthetic oligonucleotide"
atgatcgtcacaacaccagaa

SEQ ID NO: 34901 - DNA, 21 bp, Artificial Sequence
  source: /note="Description of Artificial Sequence: Synthetic oligonucleotide"
atgaaagcagcagtcagagaa

SEQ ID NO: 34902 - DNA, 21 bp, Artificial Sequence
  source: /note="Description of Artificial Sequence: Synthetic oligonucleotide"
atgaaagcagacccagaatgg

SEQ ID NO: 34903 - DNA, 21 bp, Artificial Sequence
  source: /note="Description of Artificial Sequence: Synthetic oligonucleotide"
atgaaagacaacaacgtcaca

SEQ ID NO: 34904 - DNA, 21 bp, Artificial Sequence
  source: /note="Description of Artificial Sequence: Synthetic oligonucleotide"
atgaaacacgcagcacaactc

SEQ ID NO: 34905 - DNA, 21 bp, Artificial Sequence
  source: /note="Description of Artificial Sequence: Synthetic oligonucleotide"
atgaaacacccacaatacaac

SEQ ID NO: 34906 - DNA, 21 bp, Artificial Sequence
  source: /note="Description of Artificial Sequence: Synthetic oligonucleotide"
atgaaaatgaacagaaacgaa

SEQ ID NO: 34907 - DNA, 21 bp, Artificial Sequence
  source: /note="Description of Artificial Sequence: Synthetic oligonucleotide"
atgaaaccaggactcccaatg

SEQ ID NO: 34908 - DNA, 21 bp, Artificial Sequence
  source: /note="Description of Artificial Sequence: Synthetic oligonucleotide"
atgaaaccactcgcagcaagc

SEQ ID NO: 34909 - DNA, 21 bp, Artificial Sequence
  source: /note="Description of Artificial Sequence: Synthetic oligonucleotide"
atgaaaccaacaagccaagtc

SEQ ID NO: 34910 - DNA, 21 bp, Artificial Sequence
  source: /note="Description of Artificial Sequence: Synthetic oligonucleotide"
atgaaaagcggactcacaatg

SEQ ID NO: 34911 - DNA, 21 bp, Artificial Sequence
  source: /note="Description of Artificial Sequence: Synthetic oligonucleotide"
atgaaaagcatcatcccaagc

SEQ ID NO: 34912 - DNA, 21 bp, Artificial Sequence
  source: /note="Description of Artificial Sequence: Synthetic oligonucleotide"
atgaaaagcccatacggactc

SEQ ID NO: 34913 - DNA, 21 bp, Artificial Sequence
  source: /note="Description of Artificial Sequence: Synthetic oligonucleotide"
atgaaaagccaaagcgaccca

SEQ ID NO: 34914 - DNA, 21 bp, Artificial Sequence
  source: /note="Description of Artificial Sequence: Synthetic oligonucleotide"
atgaaaagcagcgaaagcaga

SEQ ID NO: 34915 - DNA, 21 bp, Artificial Sequence
  source: /note="Description of Artificial Sequence: Synthetic oligonucleotide"
atgaaaacagaactcccagca

SEQ ID NO: 34916 - DNA, 21 bp, Artificial Sequence
  source: /note="Description of Artificial Sequence: Synthetic oligonucleotide"
atgaaaacaccaccacaaagc

SEQ ID NO: 34917 - DNA, 21 bp, Artificial Sequence
  source: /note="Description of Artificial Sequence: Synthetic oligonucleotide"
atgaaatgggacggaaaagca

SEQ ID NO: 34918 - DNA, 21 bp, Artificial Sequence
  source: /note="Description of Artificial Sequence: Synthetic oligonucleotide"
atgaaatacagcgacatcgga

SEQ ID NO: 34919 - DNA, 21 bp, Artificial Sequence
  source: /note="Description of Artificial Sequence: Synthetic oligonucleotide"
atgctcgacgacatcaacgaa

SEQ ID NO: 34920 - DNA, 21 bp, Artificial Sequence
  source: /note="Description of Artificial Sequence: Synthetic oligonucleotide"
atgctcgacacaacaaaaaga

SEQ ID NO: 34921 - DNA, 21 bp, Artificial Sequence
  source: /note="Description of Artificial Sequence: Synthetic oligonucleotide"
atgctcgaaatgaaccaaaca

SEQ ID NO: 34922 - DNA, 21 bp, Artificial Sequence
  source: /note="Description of Artificial Sequence: Synthetic oligonucleotide"
atgctcggacacctcacagca

SEQ ID NO: 34923 - DNA, 21 bp, Artificial Sequence
  source: /note="Description of Artificial Sequence: Synthetic oligonucleotide"
atgctcggactcagccacaca

SEQ ID NO: 34924 - DNA, 21 bp, Artificial Sequence
  source: /note="Description of Artificial Sequence: Synthetic oligonucleotide"
atgctccacccaacagcaaca

SEQ ID NO: 34925 - DNA, 21 bp, Artificial Sequence
  source: /note="Description of Artificial Sequence: Synthetic oligonucleotide"
atgctccacagcagcggagca

SEQ ID NO: 34926 - DNA, 21 bp, Artificial Sequence
  source: /note="Description of Artificial Sequence: Synthetic oligonucleotide"
atgctcaaatacacagaacac

SEQ ID NO: 34927 - DNA, 21 bp, Artificial Sequence
  source: /note="Description of Artificial Sequence: Synthetic oligonucleotide"
atgctcctcccaacaacaaaa

SEQ ID NO: 34928 - DNA, 21 bp, Artificial Sequence
  source: /note="Description of Artificial Sequence: Synthetic oligonucleotide"
atgctcccagacagcaacgca

SEQ ID NO: 34929 - DNA, 21 bp, Artificial Sequence
  source: /note="Description of Artificial Sequence: Synthetic oligonucleotide"
atgctcccattcgacacagac

SEQ ID NO: 34930 - DNA, 21 bp, Artificial Sequence
  source: /note="Description of Artificial Sequence: Synthetic oligonucleotide"
atgctcccaggagacagcgca

SEQ ID NO: 34931 - DNA, 21 bp, Artificial Sequence
  source: /note="Description of Artificial Sequence: Synthetic oligonucleotide"
atgctcccaggaacaccacac

SEQ ID NO: 34932 - DNA, 21 bp, Artificial Sequence
  source: /note="Description of Artificial Sequence: Synthetic oligonucleotide"
atgctccaaggacaactcagc

SEQ ID NO: 34933 - DNA, 21 bp, Artificial Sequence
  source: /note="Description of Artificial Sequence: Synthetic oligonucleotide"
atgctccaaaacggacaaaga

SEQ ID NO: 34934 - DNA, 21 bp, Artificial Sequence
  source: /note="Description of Artificial Sequence: Synthetic oligonucleotide"
atgctcagaatcgcaggagac

SEQ ID NO: 34935 - DNA, 21 bp, Artificial Sequence
  source: /note="Description of Artificial Sequence: Synthetic oligonucleotide"
atgctcagacaaggactccaa

SEQ ID NO: 34936 - DNA, 21 bp, Artificial Sequence
  source: /note="Description of Artificial Sequence: Synthetic oligonucleotide"
atgctcagaacaagccaagac

SEQ ID NO: 34937 - DNA, 21 bp, Artificial Sequence
  source: /note="Description of Artificial Sequence: Synthetic oligonucleotide"
atgctcagcggagaaatgcac

SEQ ID NO: 34938 - DNA, 21 bp, Artificial Sequence
  source: /note="Description of Artificial Sequence: Synthetic oligonucleotide"
atgctcagcaacgaagtcatc

SEQ ID NO: 34939 - DNA, 21 bp, Artificial Sequence
  source: /note="Description of Artificial Sequence: Synthetic oligonucleotide"
atgctcagcagagacgaccaa

SEQ ID NO: 34940 - DNA, 21 bp, Artificial Sequence
  source: /note="Description of Artificial Sequence: Synthetic oligonucleotide"
atgctcagcagactcgcacaa

SEQ ID NO: 34941 - DNA, 21 bp, Artificial Sequence
  source: /note="Description of Artificial Sequence: Synthetic oligonucleotide"
atgatggacagaatcgaagga

SEQ ID NO: 34942 - DNA, 21 bp, Artificial Sequence
  source: /note="Description of Artificial Sequence: Synthetic oligonucleotide"
atgatggaactccaactccca

SEQ ID NO: 34943 - DNA, 21 bp, Artificial Sequence
  source: /note="Description of Artificial Sequence: Synthetic oligonucleotide"
atgatgggaaacagcaaagga

SEQ ID NO: 34944 - DNA, 21 bp, Artificial Sequence
  source: /note="Description of Artificial Sequence: Synthetic oligonucleotide"
atgatgcacgcaggagcacaa

SEQ ID NO: 34945 - DNA, 21 bp, Artificial Sequence
  source: /note="Description of Artificial Sequence: Synthetic oligonucleotide"
atgatgcaccaagaagacagc

SEQ ID NO: 34946 - DNA, 21 bp, Artificial Sequence
  source: /note="Description of Artificial Sequence: Synthetic oligonucleotide"
atgatgaacatgagaggagga

SEQ ID NO: 34947 - DNA, 21 bp, Artificial Sequence
  source: /note="Description of Artificial Sequence: Synthetic oligonucleotide"
atgatgccacaagaaatcgtc

SEQ ID NO: 34948 - DNA, 21 bp, Artificial Sequence
  source: /note="Description of Artificial Sequence: Synthetic oligonucleotide"
atgatgagcgacaacgcaaaa

SEQ ID NO: 34949 - DNA, 21 bp, Artificial Sequence
  source: /note="Description of Artificial Sequence: Synthetic oligonucleotide"
atgatgacagacagccaaaga

SEQ ID NO: 34950 - DNA, 21 bp, Artificial Sequence
  source: /note="Description of Artificial Sequence: Synthetic oligonucleotide"
atgatgacaggagcaagcgac

SEQ ID NO: 34951 - DNA, 21 bp, Artificial Sequence
  source: /note="Description of Artificial Sequence: Synthetic oligonucleotide"
atgatgacaaaaacaggaaca

SEQ ID NO: 34952 - DNA, 21 bp, Artificial Sequence
  source: /note="Description of Artificial Sequence: Synthetic oligonucleotide"
atgatgacaagcgcaggacca

SEQ ID NO: 34953 - DNA, 21 bp, Artificial Sequence
  source: /note="Description of Artificial Sequence: Synthetic oligonucleotide"
atgaacgcattcaaacaagaa

SEQ ID NO: 34954 - DNA, 21 bp, Artificial Sequence
  source: /note="Description of Artificial Sequence: Synthetic oligonucleotide"
atgaacgcaaaatgctgcagc

SEQ ID NO: 34955 - DNA, 21 bp, Artificial Sequence
  source: /note="Description of Artificial Sequence: Synthetic oligonucleotide"
atgaacgcaagactcatcgac

SEQ ID NO: 34956 - DNA, 21 bp, Artificial Sequence
  source: /note="Description of Artificial Sequence: Synthetic oligonucleotide"
atgaacgcaagcgcaaacagc

SEQ ID NO: 34957 - DNA, 21 bp, Artificial Sequence
  source: /note="Description of Artificial Sequence: Synthetic oligonucleotide"
atgaacgcaagcacaatgatc

SEQ ID NO: 34958 - DNA, 21 bp, Artificial Sequence
  source: /note="Description of Artificial Sequence: Synthetic oligonucleotide"
atgaacggaagcctcccaatg

SEQ ID NO: 34959 - DNA, 21 bp, Artificial Sequence
  source: /note="Description of Artificial Sequence: Synthetic oligonucleotide"
atgaacggaagcagacaaatg

SEQ ID NO: 34960 - DNA, 21 bp, Artificial Sequence
  source: /note="Description of Artificial Sequence: Synthetic oligonucleotide"
atgaaccacggagcaaactac

SEQ ID NO: 34961 - DNA, 21 bp, Artificial Sequence
  source: /note="Description of Artificial Sequence: Synthetic oligonucleotide"
atgaacaaagcaagcttcgca

SEQ ID NO: 34962 - DNA, 21 bp, Artificial Sequence
  source: /note="Description of Artificial Sequence: Synthetic oligonucleotide"
atgaacaaaggaacagtcgca

SEQ ID NO: 34963 - DNA, 21 bp, Artificial Sequence
  source: /note="Description of Artificial Sequence: Synthetic oligonucleotide"
atgaacaaactcaaagtcgaa

SEQ ID NO: 34964 - DNA, 21 bp, Artificial Sequence
  source: /note="Description of Artificial Sequence: Synthetic oligonucleotide"
atgaacctccacaacccagca

SEQ ID NO: 34965 - DNA, 21 bp, Artificial Sequence
  source: /note="Description of Artificial Sequence: Synthetic oligonucleotide"
atgaacctcaaactcagccca

SEQ ID NO: 34966 - DNA, 21 bp, Artificial Sequence
  source: /note="Description of Artificial Sequence: Synthetic oligonucleotide"
atgaacctcagaatggcacca

SEQ ID NO: 34967 - DNA, 21 bp, Artificial Sequence
  source: /note="Description of Artificial Sequence: Synthetic oligonucleotide"
atgaacctcagcacaaaacca

SEQ ID NO: 34968 - DNA, 21 bp, Artificial Sequence
  source: /note="Description of Artificial Sequence: Synthetic oligonucleotide"
atgaacaacctcagcggaaga

SEQ ID NO: 34969 - DNA, 21 bp, Artificial Sequence
  source: /note="Description of Artificial Sequence: Synthetic oligonucleotide"
atgaacccaatcagcaaatgc

SEQ ID NO: 34970 - DNA, 21 bp, Artificial Sequence
  source: /note="Description of Artificial Sequence: Synthetic oligonucleotide"
atgaacccactcccataccca

SEQ ID NO: 34971 - DNA, 21 bp, Artificial Sequence
  source: /note="Description of Artificial Sequence: Synthetic oligonucleotide"
atgaacccaagcgtcgaactc

SEQ ID NO: 34972 - DNA, 21 bp, Artificial Sequence
  source: /note="Description of Artificial Sequence: Synthetic oligonucleotide"
atgaaccaaacaaaaccatac

SEQ ID NO: 34973 - DNA, 21 bp, Artificial Sequence
  source: /note="Description of Artificial Sequence: Synthetic oligonucleotide"
atgaaccaagtcagaagcctc

SEQ ID NO: 34974 - DNA, 21 bp, Artificial Sequence
  source: /note="Description of Artificial Sequence: Synthetic oligonucleotide"
atgaacagaatcgtcatgagc

SEQ ID NO: 34975 - DNA, 21 bp, Artificial Sequence
  source: /note="Description of Artificial Sequence: Synthetic oligonucleotide"
atgaacagcggatgcgaagac

SEQ ID NO: 34976 - DNA, 21 bp, Artificial Sequence
  source: /note="Description of Artificial Sequence: Synthetic oligonucleotide"
atgaacagcggaatgccattc

SEQ ID NO: 34977 - DNA, 21 bp, Artificial Sequence
  source: /note="Description of Artificial Sequence: Synthetic oligonucleotide"
atgaacagcaaaggagaacca

SEQ ID NO: 34978 - DNA, 21 bp, Artificial Sequence
  source: /note="Description of Artificial Sequence: Synthetic oligonucleotide"
atgaacagcaaaatgtaccca

SEQ ID NO: 34979 - DNA, 21 bp, Artificial Sequence
  source: /note="Description of Artificial Sequence: Synthetic oligonucleotide"
atgaacagcctcccaagaagc

SEQ ID NO: 34980 - DNA, 21 bp, Artificial Sequence
  source: /note="Description of Artificial Sequence: Synthetic oligonucleotide"
atgaacagcagaaacggatac

SEQ ID NO: 34981 - DNA, 21 bp, Artificial Sequence
  source: /note="Description of Artificial Sequence: Synthetic oligonucleotide"
atgaacagcacactcgcagca

SEQ ID NO: 34982 - DNA, 21 bp, Artificial Sequence
  source: /note="Description of Artificial Sequence: Synthetic oligonucleotide"
atgaacagcacaacaacacca

SEQ ID NO: 34983 - DNA, 21 bp, Artificial Sequence
  source: /note="Description of Artificial Sequence: Synthetic oligonucleotide"
atgaacacaaaaacattccca

SEQ ID NO: 34984 - DNA, 21 bp, Artificial Sequence
  source: /note="Description of Artificial Sequence: Synthetic oligonucleotide"
atgaacacaagcgtcgtctac

SEQ ID NO: 34985 - DNA, 21 bp, Artificial Sequence
  source: /note="Description of Artificial Sequence: Synthetic oligonucleotide"
atgaacgtcgtcggacaaagc

SEQ ID NO: 34986 - DNA, 21 bp, Artificial Sequence
  source: /note="Description of Artificial Sequence: Synthetic oligonucleotide"
atgccagcacacgtcctccca

SEQ ID NO: 34987 - DNA, 21 bp, Artificial Sequence
  source: /note="Description of Artificial Sequence: Synthetic oligonucleotide"
atgccagcaagcagcgtcagc

SEQ ID NO: 34988 - DNA, 21 bp, Artificial Sequence
  source: /note="Description of Artificial Sequence: Synthetic oligonucleotide"
atgccagcaacattcacagac

SEQ ID NO: 34989 - DNA, 21 bp, Artificial Sequence
  source: /note="Description of Artificial Sequence: Synthetic oligonucleotide"
atgccagacgcaaaaatcagc

SEQ ID NO: 34990 - DNA, 21 bp, Artificial Sequence
  source: /note="Description of Artificial Sequence: Synthetic oligonucleotide"
atgccagaccacccactcaga

SEQ ID NO: 34991 - DNA, 21 bp, Artificial Sequence
  source: /note="Description of Artificial Sequence: Synthetic oligonucleotide"
atgccagaaagcatgaacaca

SEQ ID NO: 34992 - DNA, 21 bp, Artificial Sequence
  source: /note="Description of Artificial Sequence: Synthetic oligonucleotide"
atgccattcaacgacaacgtc

SEQ ID NO: 34993 - DNA, 21 bp, Artificial Sequence
  source: /note="Description of Artificial Sequence: Synthetic oligonucleotide"
atgccacacggaagcttcgca

SEQ ID NO: 34994 - DNA, 21 bp, Artificial Sequence
  source: /note="Description of Artificial Sequence: Synthetic oligonucleotide"
atgccacacctcgaaatgaac

SEQ ID NO: 34995 - DNA, 21 bp, Artificial Sequence
  source: /note="Description of Artificial Sequence: Synthetic oligonucleotide"
atgccacacctcatcacaagc

SEQ ID NO: 34996 - DNA, 21 bp, Artificial Sequence
  source: /note="Description of Artificial Sequence: Synthetic oligonucleotide"
atgccacacatgggactcaca

SEQ ID NO: 34997 - DNA, 21 bp, Artificial Sequence
  source: /note="Description of Artificial Sequence: Synthetic oligonucleotide"
atgccaatcagcccactcgca

SEQ ID NO: 34998 - DNA, 21 bp, Artificial Sequence
  source: /note="Description of Artificial Sequence: Synthetic oligonucleotide"
atgccaatcgtcagaatcagc

SEQ ID NO: 34999 - DNA, 21 bp, Artificial Sequence
  source: /note="Description of Artificial Sequence: Synthetic oligonucleotide"
atgccaaaacaagaactcatc

SEQ ID NO: 35000 - DNA, 21 bp, Artificial Sequence
  source: /note="Description of Artificial Sequence: Synthetic oligonucleotide"
atgccactcgacagcgtcgca

SEQ ID NO: 35001 - DNA, 21 bp, Artificial Sequence
  source: /note="Description of Artificial Sequence: Synthetic oligonucleotide"
atgccactcggaggagcatac

SEQ ID NO: 35002 - DNA, 21 bp, Artificial Sequence
  source: /note="Description of Artificial Sequence: Synthetic oligonucleotide"
atgccactcagaaacacaatg

SEQ ID NO: 35003 - DNA, 21 bp, Artificial Sequence
  source: /note="Description of Artificial Sequence: Synthetic oligonucleotide"
atgccactcagcaacagcagc

SEQ ID NO: 35004 - DNA, 21 bp, Artificial Sequence
  source: /note="Description of Artificial Sequence: Synthetic oligonucleotide"
atgccaatgggagacccaatc

SEQ ID NO: 35005 - DNA, 21 bp, Artificial Sequence
  source: /note="Description of Artificial Sequence: Synthetic oligonucleotide"
atgccaatgatgctcagactc

SEQ ID NO: 35006 - DNA, 21 bp, Artificial Sequence
  source: /note="Description of Artificial Sequence: Synthetic oligonucleotide"
atgccaatgaacagaacacca

SEQ ID NO: 35007 - DNA, 21 bp, Artificial Sequence
  source: /note="Description of Artificial Sequence: Synthetic oligonucleotide"
atgccaatgagagcaaacgga

SEQ ID NO: 35008 - DNA, 21 bp, Artificial Sequence
  source: /note="Description of Artificial Sequence: Synthetic oligonucleotide"
atgccaaacgtcccaccaaca

SEQ ID NO: 35009 - DNA, 21 bp, Artificial Sequence
  source: /note="Description of Artificial Sequence: Synthetic oligonucleotide"
atgccaccagcactcctcaca

SEQ ID NO: 35010 - DNA, 21 bp, Artificial Sequence
  source: /note="Description of Artificial Sequence: Synthetic oligonucleotide"
atgccaccagaagtcccagtc

SEQ ID NO: 35011 - DNA, 21 bp, Artificial Sequence
  source: /note="Description of Artificial Sequence: Synthetic oligonucleotide"
atgccaccaccaaacctcaac

SEQ ID NO: 35012 - DNA, 21 bp, Artificial Sequence
  source: /note="Description of Artificial Sequence: Synthetic oligonucleotide"
atgccaccacaaaacgcaatg

SEQ ID NO: 35013 - DNA, 21 bp, Artificial Sequence
  source: /note="Description of Artificial Sequence: Synthetic oligonucleotide"
atgccaccaagcaacagacca

SEQ ID NO: 35014 - DNA, 21 bp, Artificial Sequence
  source: /note="Description of Artificial Sequence: Synthetic oligonucleotide"
atgccaccaagcacatacgca

SEQ ID NO: 35015 - DNA, 21 bp, Artificial Sequence
  source: /note="Description of Artificial Sequence: Synthetic oligonucleotide"
atgccacaactccacgaaaca

SEQ ID NO: 35016 - DNA, 21 bp, Artificial Sequence
  source: /note="Description of Artificial Sequence: Synthetic oligonucleotide"
atgccacaaagcagagacgaa

SEQ ID NO: 35017 - DNA, 21 bp, Artificial Sequence
  source: /note="Description of Artificial Sequence: Synthetic oligonucleotide"
atgccaagagacgcatacgga

SEQ ID NO: 35018 - DNA, 21 bp, Artificial Sequence
  source: /note="Description of Artificial Sequence: Synthetic oligonucleotide"
atgccaagaggagaaatccca

SEQ ID NO: 35019 - DNA, 21 bp, Artificial Sequence
  source: /note="Description of Artificial Sequence: Synthetic oligonucleotide"
atgccaagaaacggaccacca

SEQ ID NO: 35020 - DNA, 21 bp, Artificial Sequence
  source: /note="Description of Artificial Sequence: Synthetic oligonucleotide"
atgccaagagtcgcaagcaac

SEQ ID NO: 35021 - DNA, 21 bp, Artificial Sequence
  source: /note="Description of Artificial Sequence: Synthetic oligonucleotide"
atgccaagcgcaagcgaagtc

SEQ ID NO: 35022 - DNA, 21 bp, Artificial Sequence
  source: /note="Description of Artificial Sequence: Synthetic oligonucleotide"
atgccaagcggaagagtccac

SEQ ID NO: 35023 - DNA, 21 bp, Artificial Sequence
  source: /note="Description of Artificial Sequence: Synthetic oligonucleotide"
atgccaagcggaagagtccca

SEQ ID NO: 35024 - DNA, 21 bp, Artificial Sequence
  source: /note="Description of Artificial Sequence: Synthetic oligonucleotide"
atgccaagcatcagcctccca

SEQ ID NO: 35025 - DNA, 21 bp, Artificial Sequence
  source: /note="Description of Artificial Sequence: Synthetic oligonucleotide"
atgccaagcaacagcatcagc

SEQ ID NO: 35026 - DNA, 21 bp, Artificial Sequence
  source: /note="Description of Artificial Sequence: Synthetic oligonucleotide"
atgccaagcccagaagtctac

SEQ ID NO: 35027 - DNA, 21 bp, Artificial Sequence
  source: /note="Description of Artificial Sequence: Synthetic oligonucleotide"
atgccaacagacccaaaaatg

SEQ ID NO: 35028 - DNA, 21 bp, Artificial Sequence
  source: /note="Description of Artificial Sequence: Synthetic oligonucleotide"
atgccaacaggaacagacctc

SEQ ID NO: 35029 - DNA, 21 bp, Artificial Sequence
  source: /note="Description of Artificial Sequence: Synthetic oligonucleotide"
atgccaacaccaagaacagga

SEQ ID NO: 35030 - DNA, 21 bp, Artificial Sequence
  source: /note="Description of Artificial Sequence: Synthetic oligonucleotide"
atgccaacaagcggaccacca

SEQ ID NO: 35031 - DNA, 21 bp, Artificial Sequence
  source: /note="Description of Artificial Sequence: Synthetic oligonucleotide"
atgccaacatacgacaaaaga

SEQ ID NO: 35032 - DNA, 21 bp, Artificial Sequence
  source: /note="Description of Artificial Sequence: Synthetic oligonucleotide"
atgccagtcccagaaagacca

SEQ ID NO: 35033 - DNA, 21 bp, Artificial Sequence
  source: /note="Description of Artificial Sequence: Synthetic oligonucleotide"
atgccagtcagcggacacgtc

SEQ ID NO: 35034 - DNA, 21 bp, Artificial Sequence
  source: /note="Description of Artificial Sequence: Synthetic oligonucleotide"
atgccagtcagcagactcgaa

SEQ ID NO: 35035 - DNA, 21 bp, Artificial Sequence
  source: /note="Description of Artificial Sequence: Synthetic oligonucleotide"
atgccagtcagcagcacaaga

SEQ ID NO: 35036 - DNA, 21 bp, Artificial Sequence
  source: /note="Description of Artificial Sequence: Synthetic oligonucleotide"
atgccatggaaagacgcagca

SEQ ID NO: 35037 - DNA, 21 bp, Artificial Sequence
  source: /note="Description of Artificial Sequence: Synthetic oligonucleotide"
atgcaagcagcaagcagccca

SEQ ID NO: 35038 - DNA, 21 bp, Artificial Sequence
  source: /note="Description of Artificial Sequence: Synthetic oligonucleotide"
atgcaagcaggaagcatgaga

SEQ ID NO: 35039 - DNA, 21 bp, Artificial Sequence
  source: /note="Description of Artificial Sequence: Synthetic oligonucleotide"
atgcaagcaagccacagccca

SEQ ID NO: 35040 - DNA, 21 bp, Artificial Sequence
  source: /note="Description of Artificial Sequence: Synthetic oligonucleotide"
atgcaagacggatacacaaac

SEQ ID NO: 35041 - DNA, 21 bp, Artificial Sequence
  source: /note="Description of Artificial Sequence: Synthetic oligonucleotide"
atgcaaggaaaactcctcgca

SEQ ID NO: 35042 - DNA, 21 bp, Artificial Sequence
  source: /note="Description of Artificial Sequence: Synthetic oligonucleotide"
atgcaacacggagcacaccca

SEQ ID NO: 35043 - DNA, 21 bp, Artificial Sequence
  source: /note="Description of Artificial Sequence: Synthetic oligonucleotide"
atgcaactcgaacacagccca

SEQ ID NO: 35044 - DNA, 21 bp, Artificial Sequence
  source: /note="Description of Artificial Sequence: Synthetic oligonucleotide"
atgcaactcggaaacgtcagc

SEQ ID NO: 35045 - DNA, 21 bp, Artificial Sequence
  source: /note="Description of Artificial Sequence: Synthetic oligonucleotide"
atgcaactcggaccagtcatg

SEQ ID NO: 35046 - DNA, 21 bp, Artificial Sequence
  source: /note="Description of Artificial Sequence: Synthetic oligonucleotide"
atgcaaaacatgccaccacca

SEQ ID NO: 35047 - DNA, 21 bp, Artificial Sequence
  source: /note="Description of Artificial Sequence: Synthetic oligonucleotide"
atgcaaccaaacacaagcttc

SEQ ID NO: 35048 - DNA, 21 bp, Artificial Sequence
  source: /note="Description of Artificial Sequence: Synthetic oligonucleotide"
atgcaaagaagactcgacatc

SEQ ID NO: 35049 - DNA, 21 bp, Artificial Sequence
  source: /note="Description of Artificial Sequence: Synthetic oligonucleotide"
atgcaaagaacaacacacgtc

SEQ ID NO: 35050 - DNA, 21 bp, Artificial Sequence
  source: /note="Description of Artificial Sequence: Synthetic oligonucleotide"
atgcaaagcagagtcccactc

SEQ ID NO: 35051 - DNA, 21 bp, Artificial Sequence
  source: /note="Description of Artificial Sequence: Synthetic oligonucleotide"
atgcaaagcagcccagacgga

SEQ ID NO: 35052 - DNA, 21 bp, Artificial Sequence
  source: /note="Description of Artificial Sequence: Synthetic oligonucleotide"
atgcaaacagcaacacaagga

SEQ ID NO: 35053 - DNA, 21 bp, Artificial Sequence
  source: /note="Description of Artificial Sequence: Synthetic oligonucleotide"
atgcaaacacaaagcctccca

SEQ ID NO: 35054 - DNA, 21 bp, Artificial Sequence
  source: /note="Description of Artificial Sequence: Synthetic oligonucleotide"
atgcaagtcagcgaaagacca

SEQ ID NO: 35055 - DNA, 21 bp, Artificial Sequence
  source: /note="Description of Artificial Sequence: Synthetic oligonucleotide"
atgcaagtcagcggaccacca

SEQ ID NO: 35056 - DNA, 21 bp, Artificial Sequence
  source: /note="Description of Artificial Sequence: Synthetic oligonucleotide"
atgcaagtcacagaaggactc

SEQ ID NO: 35057 - DNA, 21 bp, Artificial Sequence
  source: /note="Description of Artificial Sequence: Synthetic oligonucleotide"
atgagagcaggagcagcagga

SEQ ID NO: 35058 - DNA, 21 bp, Artificial Sequence
  source: /note="Description of Artificial Sequence: Synthetic oligonucleotide"
atgagagcaagcgcaggaatg

SEQ ID NO: 35059 - DNA, 21 bp, Artificial Sequence
  source: /note="Description of Artificial Sequence: Synthetic oligonucleotide"
atgagagacgacgcagcagtc

SEQ ID NO: 35060 - DNA, 21 bp, Artificial Sequence
  source: /note="Description of Artificial Sequence: Synthetic oligonucleotide"
atgagagacggaccaccaaac

SEQ ID NO: 35061 - DNA, 21 bp, Artificial Sequence
  source: /note="Description of Artificial Sequence: Synthetic oligonucleotide"
atgagagaaagaagcagcgca

SEQ ID NO: 35062 - DNA, 21 bp, Artificial Sequence
  source: /note="Description of Artificial Sequence: Synthetic oligonucleotide"
atgagaggagacagcgcacca

SEQ ID NO: 35063 - DNA, 21 bp, Artificial Sequence
  source: /note="Description of Artificial Sequence: Synthetic oligonucleotide"
atgagaggattcgacgaactc

SEQ ID NO: 35064 - DNA, 21 bp, Artificial Sequence
  source: /note="Description of Artificial Sequence: Synthetic oligonucleotide"
atgagaggaacaccagtcgga

SEQ ID NO: 35065 - DNA, 21 bp, Artificial Sequence
  source: /note="Description of Artificial Sequence: Synthetic oligonucleotide"
atgagacacggaaacccagca

SEQ ID NO: 35066 - DNA, 21 bp, Artificial Sequence
  source: /note="Description of Artificial Sequence: Synthetic oligonucleotide"
atgagacacgtcaacacacca

SEQ ID NO: 35067 - DNA, 21 bp, Artificial Sequence
  source: /note="Description of Artificial Sequence: Synthetic oligonucleotide"
atgagaatcggagacagacac

SEQ ID NO: 35068 - DNA, 21 bp, Artificial Sequence
  source: /note="Description of Artificial Sequence: Synthetic oligonucleotide"
atgagactcagcacaccagaa

SEQ ID NO: 35069 - DNA, 21 bp, Artificial Sequence
  source: /note="Description of Artificial Sequence: Synthetic oligonucleotide"
atgagactcgtcagcgcagaa

SEQ ID NO: 35070 - DNA, 21 bp, Artificial Sequence
  source: /note="Description of Artificial Sequence: Synthetic oligonucleotide"
atgagaatggcagtcagcgca

SEQ ID NO: 35071 - DNA, 21 bp, Artificial Sequence
  source: /note="Description of Artificial Sequence: Synthetic oligonucleotide"
atgagaatgggaggagtccca

SEQ ID NO: 35072 - DNA, 21 bp, Artificial Sequence
  source: /note="Description of Artificial Sequence: Synthetic oligonucleotide"
atgagaaacgcagcaaaaaga

SEQ ID NO: 35073 - DNA, 21 bp, Artificial Sequence
  source: /note="Description of Artificial Sequence: Synthetic oligonucleotide"
atgagaaacagcgtctaccca

SEQ ID NO: 35074 - DNA, 21 bp, Artificial Sequence
  source: /note="Description of Artificial Sequence: Synthetic oligonucleotide"
atgagaaacacaacattcgaa

SEQ ID NO: 35075 - DNA, 21 bp, Artificial Sequence
  source: /note="Description of Artificial Sequence: Synthetic oligonucleotide"
atgagaccagcaaacgaaagc

SEQ ID NO: 35076 - DNA, 21 bp, Artificial Sequence
  source: /note="Description of Artificial Sequence: Synthetic oligonucleotide"
atgagaccagcagtcggagtc

SEQ ID NO: 35077 - DNA, 21 bp, Artificial Sequence
  source: /note="Description of Artificial Sequence: Synthetic oligonucleotide"
atgagaccaggactcgaagga

SEQ ID NO: 35078 - DNA, 21 bp, Artificial Sequence
  source: /note="Description of Artificial Sequence: Synthetic oligonucleotide"
atgagaccaacacacgcatgc

SEQ ID NO: 35079 - DNA, 21 bp, Artificial Sequence
  source: /note="Description of Artificial Sequence: Synthetic oligonucleotide"
atgagaccaacaaacgcaaca

SEQ ID NO: 35080 - DNA, 21 bp, Artificial Sequence
  source: /note="Description of Artificial Sequence: Synthetic oligonucleotide"
atgagacaaatcggataccac

SEQ ID NO: 35081 - DNA, 21 bp, Artificial Sequence
  source: /note="Description of Artificial Sequence: Synthetic oligonucleotide"
atgagacaagtcggaagagaa

SEQ ID NO: 35082 - DNA, 21 bp, Artificial Sequence
  source: /note="Description of Artificial Sequence: Synthetic oligonucleotide"
atgagaagcttcagctacgaa

SEQ ID NO: 35083 - DNA, 21 bp, Artificial Sequence
  source: /note="Description of Artificial Sequence: Synthetic oligonucleotide"
atgagaagcaacgacgtcgtc

SEQ ID NO: 35084 - DNA, 21 bp, Artificial Sequence
  source: /note="Description of Artificial Sequence: Synthetic oligonucleotide"
atgagaagcccaccactctac

SEQ ID NO: 35085 - DNA, 21 bp, Artificial Sequence
  source: /note="Description of Artificial Sequence: Synthetic oligonucleotide"
atgagaagccaaagcttcagc

SEQ ID NO: 35086 - DNA, 21 bp, Artificial Sequence
  source: /note="Description of Artificial Sequence: Synthetic oligonucleotide"
atgagaagcagagtcgacaca

SEQ ID NO: 35087 - DNA, 21 bp, Artificial Sequence
  source: /note="Description of Artificial Sequence: Synthetic oligonucleotide"
atgagaagcgtcatcgcacaa

SEQ ID NO: 35088 - DNA, 21 bp, Artificial Sequence
  source: /note="Description of Artificial Sequence: Synthetic oligonucleotide"
atgagaacagaaagcacactc

SEQ ID NO: 35089 - DNA, 21 bp, Artificial Sequence
  source: /note="Description of Artificial Sequence: Synthetic oligonucleotide"
atgagaacaaacagcagcaca

SEQ ID NO: 35090 - DNA, 21 bp, Artificial Sequence
  source: /note="Description of Artificial Sequence: Synthetic oligonucleotide"
atgagaacaagcaacacagca

SEQ ID NO: 35091 - DNA, 21 bp, Artificial Sequence
  source: /note="Description of Artificial Sequence: Synthetic oligonucleotide"
atgagagtcaacacagaccca

SEQ ID NO: 35092 - DNA, 21 bp, Artificial Sequence
  source: /note="Description of Artificial Sequence: Synthetic oligonucleotide"
atgagagtcagcacagcagca

SEQ ID NO: 35093 - DNA, 21 bp, Artificial Sequence
  source: /note="Description of Artificial Sequence: Synthetic oligonucleotide"
atgagatacgcaccaggaaca

SEQ ID NO: 35094 - DNA, 21 bp, Artificial Sequence
  source: /note="Description of Artificial Sequence: Synthetic oligonucleotide"
atgagcgcagacagattcagc

SEQ ID NO: 35095 - DNA, 21 bp, Artificial Sequence
  source: /note="Description of Artificial Sequence: Synthetic oligonucleotide"
atgagcgcaaaaacatacctc

SEQ ID NO: 35096 - DNA, 21 bp, Artificial Sequence
  source: /note="Description of Artificial Sequence: Synthetic oligonucleotide"
atgagcgcaagcatcggaagc

SEQ ID NO: 35097 - DNA, 21 bp, Artificial Sequence
  source: /note="Description of Artificial Sequence: Synthetic oligonucleotide"
atgagcgcagtcctcccacac

SEQ ID NO: 35098 - DNA, 21 bp, Artificial Sequence
  source: /note="Description of Artificial Sequence: Synthetic oligonucleotide"
atgagcgaccaactcagattc

SEQ ID NO: 35099 - DNA, 21 bp, Artificial Sequence
  source: /note="Description of Artificial Sequence: Synthetic oligonucleotide"
atgagcgacagccacagcaga

SEQ ID NO: 35100 - DNA, 21 bp, Artificial Sequence
  source: /note="Description of Artificial Sequence: Synthetic oligonucleotide"
atgagcgactggaacggaatc

SEQ ID NO: 35101 - DNA, 21 bp, Artificial Sequence
  source: /note="Description of Artificial Sequence: Synthetic oligonucleotide"
atgagcgaaatgagcacacac

SEQ ID NO: 35102 - DNA, 21 bp, Artificial Sequence
  source: /note="Description of Artificial Sequence: Synthetic oligonucleotide"
atgagcggaggaagcagctac

SEQ ID NO: 35103 - DNA, 21 bp, Artificial Sequence
  source: /note="Description of Artificial Sequence: Synthetic oligonucleotide"
atgagcggaaaccacgcaaca

SEQ ID NO: 35104 - DNA, 21 bp, Artificial Sequence
  source: /note="Description of Artificial Sequence: Synthetic oligonucleotide"
atgagcggaccacaactcagc

SEQ ID NO: 35105 - DNA, 21 bp, Artificial Sequence
  source: /note="Description of Artificial Sequence: Synthetic oligonucleotide"
atgagcggaagaggacaaatc

SEQ ID NO: 35106 - DNA, 21 bp, Artificial Sequence
  source: /note="Description of Artificial Sequence: Synthetic oligonucleotide"
atgagccaccacagcacaaca

SEQ ID NO: 35107 - DNA, 21 bp, Artificial Sequence
  source: /note="Description of Artificial Sequence: Synthetic oligonucleotide"
atgagccacccatacaaacca

SEQ ID NO: 35108 - DNA, 21 bp, Artificial Sequence
  source: /note="Description of Artificial Sequence: Synthetic oligonucleotide"
atgagccactacctcaaagca

SEQ ID NO: 35109 - DNA, 21 bp, Artificial Sequence
  source: /note="Description of Artificial Sequence: Synthetic oligonucleotide"
atgagcatcgacgaagcagaa

SEQ ID NO: 35110 - DNA, 21 bp, Artificial Sequence
  source: /note="Description of Artificial Sequence: Synthetic oligonucleotide"
atgagcatcggaacaagcgaa

SEQ ID NO: 35111 - DNA, 21 bp, Artificial Sequence
  source: /note="Description of Artificial Sequence: Synthetic oligonucleotide"
atgagcatcatcggaggagtc

SEQ ID NO: 35112 - DNA, 21 bp, Artificial Sequence
  source: /note="Description of Artificial Sequence: Synthetic oligonucleotide"
atgagcatcagccacacaaca

SEQ ID NO: 35113 - DNA, 21 bp, Artificial Sequence
  source: /note="Description of Artificial Sequence: Synthetic oligonucleotide"
atgagcatcacacaccacagc

SEQ ID NO: 35114 - DNA, 21 bp, Artificial Sequence
  source: /note="Description of Artificial Sequence: Synthetic oligonucleotide"
atgagcaaaatctggccaagc

SEQ ID NO: 35115 - DNA, 21 bp, Artificial Sequence
  source: /note="Description of Artificial Sequence: Synthetic oligonucleotide"
atgagcaaaaacctcagcgca

SEQ ID NO: 35116 - DNA, 21 bp, Artificial Sequence
  source: /note="Description of Artificial Sequence: Synthetic oligonucleotide"
atgagcaaaagaacagacagc

SEQ ID NO: 35117 - DNA, 21 bp, Artificial Sequence
  source: /note="Description of Artificial Sequence: Synthetic oligonucleotide"
atgagcaaaacaatcgcacaa

SEQ ID NO: 35118 - DNA, 21 bp, Artificial Sequence
  source: /note="Description of Artificial Sequence: Synthetic oligonucleotide"
atgagcaaagtcccattcaac

SEQ ID NO: 35119 - DNA, 21 bp, Artificial Sequence
  source: /note="Description of Artificial Sequence: Synthetic oligonucleotide"
atgagcctcgcaaacaaaagc

SEQ ID NO: 35120 - DNA, 21 bp, Artificial Sequence
  source: /note="Description of Artificial Sequence: Synthetic oligonucleotide"
atgagcctcaaactcagcgga

SEQ ID NO: 35121 - DNA, 21 bp, Artificial Sequence
  source: /note="Description of Artificial Sequence: Synthetic oligonucleotide"
atgagcctcccaagcacacaa

SEQ ID NO: 35122 - DNA, 21 bp, Artificial Sequence
  source: /note="Description of Artificial Sequence: Synthetic oligonucleotide"
atgagcctcacagtcacagca

SEQ ID NO: 35123 - DNA, 21 bp, Artificial Sequence
  source: /note="Description of Artificial Sequence: Synthetic oligonucleotide"
atgagcatgcacggaggaagc

SEQ ID NO: 35124 - DNA, 21 bp, Artificial Sequence
  source: /note="Description of Artificial Sequence: Synthetic oligonucleotide"
atgagcaacggatggcaagac

SEQ ID NO: 35125 - DNA, 21 bp, Artificial Sequence
  source: /note="Description of Artificial Sequence: Synthetic oligonucleotide"
atgagcaacatcggactcgga

SEQ ID NO: 35126 - DNA, 21 bp, Artificial Sequence
  source: /note="Description of Artificial Sequence: Synthetic oligonucleotide"
atgagcaacaaccacggactc

SEQ ID NO: 35127 - DNA, 21 bp, Artificial Sequence
  source: /note="Description of Artificial Sequence: Synthetic oligonucleotide"
atgagcaacagcgaattcgga

SEQ ID NO: 35128 - DNA, 21 bp, Artificial Sequence
  source: /note="Description of Artificial Sequence: Synthetic oligonucleotide"
atgagcccagcaatgcaaaca

SEQ ID NO: 35129 - DNA, 21 bp, Artificial Sequence
  source: /note="Description of Artificial Sequence: Synthetic oligonucleotide"
atgagcccagaccaaagatac

SEQ ID NO: 35130 - DNA, 21 bp, Artificial Sequence
  source: /note="Description of Artificial Sequence: Synthetic oligonucleotide"
atgagcccaggagtcaacgca

SEQ ID NO: 35131 - DNA, 21 bp, Artificial Sequence
  source: /note="Description of Artificial Sequence: Synthetic oligonucleotide"
atgagcccacacttcaacaca

SEQ ID NO: 35132 - DNA, 21 bp, Artificial Sequence
  source: /note="Description of Artificial Sequence: Synthetic oligonucleotide"
atgagcccaatggtcacagca

SEQ ID NO: 35133 - DNA, 21 bp, Artificial Sequence
  source: /note="Description of Artificial Sequence: Synthetic oligonucleotide"
atgagcccaagcgacttcgga

SEQ ID NO: 35134 - DNA, 21 bp, Artificial Sequence
  source: /note="Description of Artificial Sequence: Synthetic oligonucleotide"
atgagcccaagcagcccaatg

SEQ ID NO: 35135 - DNA, 21 bp, Artificial Sequence
  source: /note="Description of Artificial Sequence: Synthetic oligonucleotide"
atgagccaacaaagcagcgga

SEQ ID NO: 35136 - DNA, 21 bp, Artificial Sequence
  source: /note="Description of Artificial Sequence: Synthetic oligonucleotide"
atgagccaaagaagagaccca

SEQ ID NO: 35137 - DNA, 21 bp, Artificial Sequence
  source: /note="Description of Artificial Sequence: Synthetic oligonucleotide"
atgagcagagacgtcagccac

SEQ ID NO: 35138 - DNA, 21 bp, Artificial Sequence
  source: /note="Description of Artificial Sequence: Synthetic oligonucleotide"
atgagcagagaaagcggagga

SEQ ID NO: 35139 - DNA, 21 bp, Artificial Sequence
  source: /note="Description of Artificial Sequence: Synthetic oligonucleotide"
atgagcagactcgacagccca

SEQ ID NO: 35140 - DNA, 21 bp, Artificial Sequence
  source: /note="Description of Artificial Sequence: Synthetic oligonucleotide"
atgagcagactcggagcaaca

SEQ ID NO: 35141 - DNA, 21 bp, Artificial Sequence
  source: /note="Description of Artificial Sequence: Synthetic oligonucleotide"
atgagcagaaacctctgctgc

SEQ ID NO: 35142 - DNA, 21 bp, Artificial Sequence
  source: /note="Description of Artificial Sequence: Synthetic oligonucleotide"
atgagcagcgcaagcagccca

SEQ ID NO: 35143 - DNA, 21 bp, Artificial Sequence
  source: /note="Description of Artificial Sequence: Synthetic oligonucleotide"
atgagcagcgaaccagtcaaa

SEQ ID NO: 35144 - DNA, 21 bp, Artificial Sequence
  source: /note="Description of Artificial Sequence: Synthetic oligonucleotide"
atgagcagccacggagtcgca

SEQ ID NO: 35145 - DNA, 21 bp, Artificial Sequence
  source: /note="Description of Artificial Sequence: Synthetic oligonucleotide"
atgagcagcctcaacagcctc

SEQ ID NO: 35146 - DNA, 21 bp, Artificial Sequence
  source: /note="Description of Artificial Sequence: Synthetic oligonucleotide"
atgagcagcctcaacgtccac

SEQ ID NO: 35147 - DNA, 21 bp, Artificial Sequence
  source: /note="Description of Artificial Sequence: Synthetic oligonucleotide"
atgagcagcctcagacaagca

SEQ ID NO: 35148 - DNA, 21 bp, Artificial Sequence
  source: /note="Description of Artificial Sequence: Synthetic oligonucleotide"
atgagcagcccacaactcagc

SEQ ID NO: 35149 - DNA, 21 bp, Artificial Sequence
  source: /note="Description of Artificial Sequence: Synthetic oligonucleotide"
atgagcagccaaacaagcaaa

SEQ ID NO: 35150 - DNA, 21 bp, Artificial Sequence
  source: /note="Description of Artificial Sequence: Synthetic oligonucleotide"
atgagcagcagatgggcagca

SEQ ID NO: 35151 - DNA, 21 bp, Artificial Sequence
  source: /note="Description of Artificial Sequence: Synthetic oligonucleotide"
atgagcagcagcgtccacaca

SEQ ID NO: 35152 - DNA, 21 bp, Artificial Sequence
  source: /note="Description of Artificial Sequence: Synthetic oligonucleotide"
atgagcagcacaagaacagac

SEQ ID NO: 35153 - DNA, 21 bp, Artificial Sequence
  source: /note="Description of Artificial Sequence: Synthetic oligonucleotide"
atgagcagcacaagctacagc

SEQ ID NO: 35154 - DNA, 21 bp, Artificial Sequence
  source: /note="Description of Artificial Sequence: Synthetic oligonucleotide"
atgagcacagaagaccacgca

SEQ ID NO: 35155 - DNA, 21 bp, Artificial Sequence
  source: /note="Description of Artificial Sequence: Synthetic oligonucleotide"
atgagcacagaaagaaacgca

SEQ ID NO: 35156 - DNA, 21 bp, Artificial Sequence
  source: /note="Description of Artificial Sequence: Synthetic oligonucleotide"
atgagcacattcccaccacca

SEQ ID NO: 35157 - DNA, 21 bp, Artificial Sequence
  source: /note="Description of Artificial Sequence: Synthetic oligonucleotide"
atgagcacaggaagactcatc

SEQ ID NO: 35158 - DNA, 21 bp, Artificial Sequence
  source: /note="Description of Artificial Sequence: Synthetic oligonucleotide"
atgagcacacacgtcgtcagc

SEQ ID NO: 35159 - DNA, 21 bp, Artificial Sequence
  source: /note="Description of Artificial Sequence: Synthetic oligonucleotide"
atgagcacactcccacacgca

SEQ ID NO: 35160 - DNA, 21 bp, Artificial Sequence
  source: /note="Description of Artificial Sequence: Synthetic oligonucleotide"
atgagcacaatgcaaagaagc

SEQ ID NO: 35161 - DNA, 21 bp, Artificial Sequence
  source: /note="Description of Artificial Sequence: Synthetic oligonucleotide"
atgagcacaaacttcaaagga

SEQ ID NO: 35162 - DNA, 21 bp, Artificial Sequence
  source: /note="Description of Artificial Sequence: Synthetic oligonucleotide"
atgagcacaaacacacacctc

SEQ ID NO: 35163 - DNA, 21 bp, Artificial Sequence
  source: /note="Description of Artificial Sequence: Synthetic oligonucleotide"
atgagcacaagaatcgcaaac

SEQ ID NO: 35164 - DNA, 21 bp, Artificial Sequence
  source: /note="Description of Artificial Sequence: Synthetic oligonucleotide"
atgagcacaagaccaatgcca

SEQ ID NO: 35165 - DNA, 21 bp, Artificial Sequence
  source: /note="Description of Artificial Sequence: Synthetic oligonucleotide"
atgagcacaagaagcccaagc

SEQ ID NO: 35166 - DNA, 21 bp, Artificial Sequence
  source: /note="Description of Artificial Sequence: Synthetic oligonucleotide"
atgagcgtcccacacggagac

SEQ ID NO: 35167 - DNA, 21 bp, Artificial Sequence
  source: /note="Description of Artificial Sequence: Synthetic oligonucleotide"
atgagctacccataccaaaac

SEQ ID NO: 35168 - DNA, 21 bp, Artificial Sequence
  source: /note="Description of Artificial Sequence: Synthetic oligonucleotide"
atgagctaccaaaaaccaagc

SEQ ID NO: 35169 - DNA, 21 bp, Artificial Sequence
  source: /note="Description of Artificial Sequence: Synthetic oligonucleotide"
atgagctacacaagcgacagc

SEQ ID NO: 35170 - DNA, 21 bp, Artificial Sequence
  source: /note="Description of Artificial Sequence: Synthetic oligonucleotide"
atgacagcaaacacagcactc

SEQ ID NO: 35171 - DNA, 21 bp, Artificial Sequence
  source: /note="Description of Artificial Sequence: Synthetic oligonucleotide"
atgacagacatcacaggaaga

SEQ ID NO: 35172 - DNA, 21 bp, Artificial Sequence
  source: /note="Description of Artificial Sequence: Synthetic oligonucleotide"
atgacagacagccaaccagga

SEQ ID NO: 35173 - DNA, 21 bp, Artificial Sequence
  source: /note="Description of Artificial Sequence: Synthetic oligonucleotide"
atgacagacacaagaagactc

SEQ ID NO: 35174 - DNA, 21 bp, Artificial Sequence
  source: /note="Description of Artificial Sequence: Synthetic oligonucleotide"
atgacagacgtcggagtcaga

SEQ ID NO: 35175 - DNA, 21 bp, Artificial Sequence
  source: /note="Description of Artificial Sequence: Synthetic oligonucleotide"
atgacagactacagcaaagga

SEQ ID NO: 35176 - DNA, 21 bp, Artificial Sequence
  source: /note="Description of Artificial Sequence: Synthetic oligonucleotide"
atgacagaaccaatggtcgac

SEQ ID NO: 35177 - DNA, 21 bp, Artificial Sequence
  source: /note="Description of Artificial Sequence: Synthetic oligonucleotide"
atgacagaaagcctcacagca

SEQ ID NO: 35178 - DNA, 21 bp, Artificial Sequence
  source: /note="Description of Artificial Sequence: Synthetic oligonucleotide"
atgacagaagtcacaacattc

SEQ ID NO: 35179 - DNA, 21 bp, Artificial Sequence
  source: /note="Description of Artificial Sequence: Synthetic oligonucleotide"
atgacattcccaaaactcaac

SEQ ID NO: 35180 - DNA, 21 bp, Artificial Sequence
  source: /note="Description of Artificial Sequence: Synthetic oligonucleotide"
atgacaggaatgacaagcgca

SEQ ID NO: 35181 - DNA, 21 bp, Artificial Sequence
  source: /note="Description of Artificial Sequence: Synthetic oligonucleotide"
atgacaggaaaccacagaatc

SEQ ID NO: 35182 - DNA, 21 bp, Artificial Sequence
  source: /note="Description of Artificial Sequence: Synthetic oligonucleotide"
atgacaggaacaagccaacca

SEQ ID NO: 35183 - DNA, 21 bp, Artificial Sequence
  source: /note="Description of Artificial Sequence: Synthetic oligonucleotide"
atgacacacccaccaagcgac

SEQ ID NO: 35184 - DNA, 21 bp, Artificial Sequence
  source: /note="Description of Artificial Sequence: Synthetic oligonucleotide"
atgacacacacaggaacactc

SEQ ID NO: 35185 - DNA, 21 bp, Artificial Sequence
  source: /note="Description of Artificial Sequence: Synthetic oligonucleotide"
atgacaaaaccacacatcgtc

SEQ ID NO: 35186 - DNA, 21 bp, Artificial Sequence
  source: /note="Description of Artificial Sequence: Synthetic oligonucleotide"
atgacactcggaagcgtcgtc

SEQ ID NO: 35187 - DNA, 21 bp, Artificial Sequence
  source: /note="Description of Artificial Sequence: Synthetic oligonucleotide"
atgacactccaccaacaattc

SEQ ID NO: 35188 - DNA, 21 bp, Artificial Sequence
  source: /note="Description of Artificial Sequence: Synthetic oligonucleotide"
atgacactcagcacaggagca

SEQ ID NO: 35189 - DNA, 21 bp, Artificial Sequence
  source: /note="Description of Artificial Sequence: Synthetic oligonucleotide"
atgacactcgtcgcaagccca

SEQ ID NO: 35190 - DNA, 21 bp, Artificial Sequence
  source: /note="Description of Artificial Sequence: Synthetic oligonucleotide"
atgacaatggaagcagcaaaa

SEQ ID NO: 35191 - DNA, 21 bp, Artificial Sequence
  source: /note="Description of Artificial Sequence: Synthetic oligonucleotide"
atgacaatgggagaattcaaa

SEQ ID NO: 35192 - DNA, 21 bp, Artificial Sequence
  source: /note="Description of Artificial Sequence: Synthetic oligonucleotide"
atgacaatgacacacagagga

SEQ ID NO: 35193 - DNA, 21 bp, Artificial Sequence
  source: /note="Description of Artificial Sequence: Synthetic oligonucleotide"
atgacaaacgcagtcgtcgac

SEQ ID NO: 35194 - DNA, 21 bp, Artificial Sequence
  source: /note="Description of Artificial Sequence: Synthetic oligonucleotide"
atgacaaacggacacggaatg

SEQ ID NO: 35195 - DNA, 21 bp, Artificial Sequence
  source: /note="Description of Artificial Sequence: Synthetic oligonucleotide"
atgacaaacctccaaagcctc

SEQ ID NO: 35196 - DNA, 21 bp, Artificial Sequence
  source: /note="Description of Artificial Sequence: Synthetic oligonucleotide"
atgacaaacagagcaacagca

SEQ ID NO: 35197 - DNA, 21 bp, Artificial Sequence
  source: /note="Description of Artificial Sequence: Synthetic oligonucleotide"
atgacaccacacaacagcaga

SEQ ID NO: 35198 - DNA, 21 bp, Artificial Sequence
  source: /note="Description of Artificial Sequence: Synthetic oligonucleotide"
atgacaccaccacacggagca

SEQ ID NO: 35199 - DNA, 21 bp, Artificial Sequence
  source: /note="Description of Artificial Sequence: Synthetic oligonucleotide"
atgacaccaacaagctacaac

SEQ ID NO: 35200 - DNA, 21 bp, Artificial Sequence
  source: /note="Description of Artificial Sequence: Synthetic oligonucleotide"
atgacacaaacagacgtcaca

SEQ ID NO: 35201 - DNA, 21 bp, Artificial Sequence
  source: /note="Description of Artificial Sequence: Synthetic oligonucleotide"
atgacaagaagcgaatggagc

SEQ ID NO: 35202 - DNA, 21 bp, Artificial Sequence
  source: /note="Description of Artificial Sequence: Synthetic oligonucleotide"
atgacaagcctcgcagcactc

SEQ ID NO: 35203 - DNA, 21 bp, Artificial Sequence
  source: /note="Description of Artificial Sequence: Synthetic oligonucleotide"
atgacaagcaacacaagaatg

SEQ ID NO: 35204 - DNA, 21 bp, Artificial Sequence
  source: /note="Description of Artificial Sequence: Synthetic oligonucleotide"
atgacaagcgtcagaatgagc

SEQ ID NO: 35205 - DNA, 21 bp, Artificial Sequence
  source: /note="Description of Artificial Sequence: Synthetic oligonucleotide"
atgacaacaggaatcgacagc

SEQ ID NO: 35206 - DNA, 21 bp, Artificial Sequence
  source: /note="Description of Artificial Sequence: Synthetic oligonucleotide"
atgacaacaagcccattcgca

SEQ ID NO: 35207 - DNA, 21 bp, Artificial Sequence
  source: /note="Description of Artificial Sequence: Synthetic oligonucleotide"
atgacaacaagcagcgacctc

SEQ ID NO: 35208 - DNA, 21 bp, Artificial Sequence
  source: /note="Description of Artificial Sequence: Synthetic oligonucleotide"
atgacagtcggagacagcgca

SEQ ID NO: 35209 - DNA, 21 bp, Artificial Sequence
  source: /note="Description of Artificial Sequence: Synthetic oligonucleotide"
atgacagtcggaatcccagca

SEQ ID NO: 35210 - DNA, 21 bp, Artificial Sequence
  source: /note="Description of Artificial Sequence: Synthetic oligonucleotide"
atgacagtcagcaacaaatac

SEQ ID NO: 35211 - DNA, 21 bp, Artificial Sequence
  source: /note="Description of Artificial Sequence: Synthetic oligonucleotide"
atgacagtcagcccaggaaca

SEQ ID NO: 35212 - DNA, 21 bp, Artificial Sequence
  source: /note="Description of Artificial Sequence: Synthetic oligonucleotide"
atggtcgcaagcgacaacagc

SEQ ID NO: 35213 - DNA, 21 bp, Artificial Sequence
  source: /note="Description of Artificial Sequence: Synthetic oligonucleotide"
atggtcgacagagtcctcgac

SEQ ID NO: 35214 - DNA, 21 bp, Artificial Sequence
  source: /note="Description of Artificial Sequence: Synthetic oligonucleotide"
atggtcgaactcacatgggaa

SEQ ID NO: 35215 - DNA, 21 bp, Artificial Sequence
  source: /note="Description of Artificial Sequence: Synthetic oligonucleotide"
atggtcggattcggagcagca

SEQ ID NO: 35216 - DNA, 21 bp, Artificial Sequence
  source: /note="Description of Artificial Sequence: Synthetic oligonucleotide"
atggtcggacaagtcaaaaac

SEQ ID NO: 35217 - DNA, 21 bp, Artificial Sequence
  source: /note="Description of Artificial Sequence: Synthetic oligonucleotide"
atggtcggaagaccaatcgtc

SEQ ID NO: 35218 - DNA, 21 bp, Artificial Sequence
  source: /note="Description of Artificial Sequence: Synthetic oligonucleotide"
atggtcggaagaacaggagga

SEQ ID NO: 35219 - DNA, 21 bp, Artificial Sequence
  source: /note="Description of Artificial Sequence: Synthetic oligonucleotide"
atggtcggaagagtcccaagc

SEQ ID NO: 35220 - DNA, 21 bp, Artificial Sequence
  source: /note="Description of Artificial Sequence: Synthetic oligonucleotide"
atggtccacagcagcgcacac

SEQ ID NO: 35221 - DNA, 21 bp, Artificial Sequence
  source: /note="Description of Artificial Sequence: Synthetic oligonucleotide"
atggtccacagcagcgaaagc

SEQ ID NO: 35222 - DNA, 21 bp, Artificial Sequence
  source: /note="Description of Artificial Sequence: Synthetic oligonucleotide"
atggtcatccacccagaccac

SEQ ID NO: 35223 - DNA, 21 bp, Artificial Sequence
  source: /note="Description of Artificial Sequence: Synthetic oligonucleotide"
atggtcctcaaactcgcagca

SEQ ID NO: 35224 - DNA, 21 bp, Artificial Sequence
  source: /note="Description of Artificial Sequence: Synthetic oligonucleotide"
atggtcaacgtcatcatgcca

SEQ ID NO: 35225 - DNA, 21 bp, Artificial Sequence
  source: /note="Description of Artificial Sequence: Synthetic oligonucleotide"
atggtcaactacctcgacgtc

SEQ ID NO: 35226 - DNA, 21 bp, Artificial Sequence
  source: /note="Description of Artificial Sequence: Synthetic oligonucleotide"
atggtcccaggaaacagcgga

SEQ ID NO: 35227 - DNA, 21 bp, Artificial Sequence
  source: /note="Description of Artificial Sequence: Synthetic oligonucleotide"
atggtcccaagagaaaacctc

SEQ ID NO: 35228 - DNA, 21 bp, Artificial Sequence
  source: /note="Description of Artificial Sequence: Synthetic oligonucleotide"
atggtcccaagccaacacagc

SEQ ID NO: 35229 - DNA, 21 bp, Artificial Sequence
  source: /note="Description of Artificial Sequence: Synthetic oligonucleotide"
atggtcccaagcagcgaaatg

SEQ ID NO: 35230 - DNA, 21 bp, Artificial Sequence
  source: /note="Description of Artificial Sequence: Synthetic oligonucleotide"
atggtccaaagaacaacaaca

SEQ ID NO: 35231 - DNA, 21 bp, Artificial Sequence
  source: /note="Description of Artificial Sequence: Synthetic oligonucleotide"
atggtcagagcactcccatgc

SEQ ID NO: 35232 - DNA, 21 bp, Artificial Sequence
  source: /note="Description of Artificial Sequence: Synthetic oligonucleotide"
atggtcagcaacagacaaaca

SEQ ID NO: 35233 - DNA, 21 bp, Artificial Sequence
  source: /note="Description of Artificial Sequence: Synthetic oligonucleotide"
atggtcagcccaagcccaaca

SEQ ID NO: 35234 - DNA, 21 bp, Artificial Sequence
  source: /note="Description of Artificial Sequence: Synthetic oligonucleotide"
atggtcagcgtcgacagagac

SEQ ID NO: 35235 - DNA, 21 bp, Artificial Sequence
  source: /note="Description of Artificial Sequence: Synthetic oligonucleotide"
atggtcacactcacaccagga

SEQ ID NO: 35236 - DNA, 21 bp, Artificial Sequence
  source: /note="Description of Artificial Sequence: Synthetic oligonucleotide"
atggtcacaaacgtcacaaaa

SEQ ID NO: 35237 - DNA, 21 bp, Artificial Sequence
  source: /note="Description of Artificial Sequence: Synthetic oligonucleotide"
atggtcacaagaccagaaagc

SEQ ID NO: 35238 - DNA, 21 bp, Artificial Sequence
  source: /note="Description of Artificial Sequence: Synthetic oligonucleotide"
atggtcacaagcagcacaagc

SEQ ID NO: 35239 - DNA, 21 bp, Artificial Sequence
  source: /note="Description of Artificial Sequence: Synthetic oligonucleotide"
atggtcacatacggacaacaa

SEQ ID NO: 35240 - DNA, 21 bp, Artificial Sequence
  source: /note="Description of Artificial Sequence: Synthetic oligonucleotide"
atggtcgtccaccacaacaac

SEQ ID NO: 35241 - DNA, 21 bp, Artificial Sequence
  source: /note="Description of Artificial Sequence: Synthetic oligonucleotide"
atggtcgtcaaaatggtcagc

SEQ ID NO: 35242 - DNA, 21 bp, Artificial Sequence
  source: /note="Description of Artificial Sequence: Synthetic oligonucleotide"
atgtggaacaaagaacacgac

SEQ ID NO: 35243 - DNA, 21 bp, Artificial Sequence
  source: /note="Description of Artificial Sequence: Synthetic oligonucleotide"
atgtacgacaacgacgtctgg

SEQ ID NO: 35244 - DNA, 21 bp, Artificial Sequence
  source: /note="Description of Artificial Sequence: Synthetic oligonucleotide"
atgtacgacagaagcggactc

SEQ ID NO: 35245 - DNA, 21 bp, Artificial Sequence
  source: /note="Description of Artificial Sequence: Synthetic oligonucleotide"
atgtacgaaagcagaggagtc

SEQ ID NO: 35246 - DNA, 21 bp, Artificial Sequence
  source: /note="Description of Artificial Sequence: Synthetic oligonucleotide"
atgtacccaggaatgatgatg

SEQ ID NO: 35247 - DNA, 21 bp, Artificial Sequence
  source: /note="Description of Artificial Sequence: Synthetic oligonucleotide"
atgtacccaagcggaatcgtc

SEQ ID NO: 35248 - DNA, 21 bp, Artificial Sequence
  source: /note="Description of Artificial Sequence: Synthetic oligonucleotide"
atgtacccaacacacacagga

SEQ ID NO: 35249 - DNA, 21 bp, Artificial Sequence
  source: /note="Description of Artificial Sequence: Synthetic oligonucleotide"
atgtacccagtcagactcgac

SEQ ID NO: 35250 - DNA, 21 bp, Artificial Sequence
  source: /note="Description of Artificial Sequence: Synthetic oligonucleotide"
atgtaccaagaacacacagaa

SEQ ID NO: 35251 - DNA, 21 bp, Artificial Sequence
  source: /note="Description of Artificial Sequence: Synthetic oligonucleotide"
atgtaccaacaagcacacagc

SEQ ID NO: 35252 - DNA, 21 bp, Artificial Sequence
  source: /note="Description of Artificial Sequence: Synthetic oligonucleotide"
atgtacagagacgaactcaca

SEQ ID NO: 35253 - DNA, 21 bp, Artificial Sequence
  source: /note="Description of Artificial Sequence: Synthetic oligonucleotide"
atgtacagcatgagcaacgtc

SEQ ID NO: 35254 - DNA, 21 bp, Artificial Sequence
  source: /note="Description of Artificial Sequence: Synthetic oligonucleotide"
atgtacagcacacaaagcagc

SEQ ID NO: 35255 - DNA, 21 bp, Artificial Sequence
  source: /note="Description of Artificial Sequence: Synthetic oligonucleotide"
atgtacacaagcatggcagga

SEQ ID NO: 35256 - DNA, 21 bp, Artificial Sequence
  source: /note="Description of Artificial Sequence: Synthetic oligonucleotide"
atgtacgtcgcagcaagccca

SEQ ID NO: 35257 - DNA, 21 bp, Artificial Sequence
  source: /note="Description of Artificial Sequence: Synthetic oligonucleotide"
aacgcagcaccaagcacaatc

SEQ ID NO: 35258 - DNA, 21 bp, Artificial Sequence
  source: /note="Description of Artificial Sequence: Synthetic oligonucleotide"
aacgcagcaagactcacaagc

SEQ ID NO: 35259 - DNA, 21 bp, Artificial Sequence
  source: /note="Description of Artificial Sequence: Synthetic oligonucleotide"
aacgcagcaagcccaggattc

SEQ ID NO: 35260 - DNA, 21 bp, Artificial Sequence
  source: /note="Description of Artificial Sequence: Synthetic oligonucleotide"
aacgcagcaagccaaagccca

SEQ ID NO: 35261 - DNA, 21 bp, Artificial Sequence
  source: /note="Description of Artificial Sequence: Synthetic oligonucleotide"
aacgcagacgcactcggaagc

SEQ ID NO: 35262 - DNA, 21 bp, Artificial Sequence
  source: /note="Description of Artificial Sequence: Synthetic oligonucleotide"
aacgcagacccaagagacaga

SEQ ID NO: 35263 - DNA, 21 bp, Artificial Sequence
  source: /note="Description of Artificial Sequence: Synthetic oligonucleotide"
aacgcagacagaagaagcgaa

SEQ ID NO: 35264 - DNA, 21 bp, Artificial Sequence
  source: /note="Description of Artificial Sequence: Synthetic oligonucleotide"
aacgcagaagcattcctcgac

SEQ ID NO: 35265 - DNA, 21 bp, Artificial Sequence
  source: /note="Description of Artificial Sequence: Synthetic oligonucleotide"
aacgcagaagacagaacagtc

SEQ ID NO: 35266 - DNA, 21 bp, Artificial Sequence
  source: /note="Description of Artificial Sequence: Synthetic oligonucleotide"
aacgcattcagcacaagcaca

SEQ ID NO: 35267 - DNA, 21 bp, Artificial Sequence
  source: /note="Description of Artificial Sequence: Synthetic oligonucleotide"
aacgcaggaggaacatgggac

SEQ ID NO: 35268 - DNA, 21 bp, Artificial Sequence
  source: /note="Description of Artificial Sequence: Synthetic oligonucleotide"
aacgcaggaacaagacaagca

SEQ ID NO: 35269 - DNA, 21 bp, Artificial Sequence
  source: /note="Description of Artificial Sequence: Synthetic oligonucleotide"
aacgcacacctcagcctcaac

SEQ ID NO: 35270 - DNA, 21 bp, Artificial Sequence
  source: /note="Description of Artificial Sequence: Synthetic oligonucleotide"
aacgcacacagcacactcgtc

SEQ ID NO: 35271 - DNA, 21 bp, Artificial Sequence
  source: /note="Description of Artificial Sequence: Synthetic oligonucleotide"
aacgcacacacagacagacaa

SEQ ID NO: 35272 - DNA, 21 bp, Artificial Sequence
  source: /note="Description of Artificial Sequence: Synthetic oligonucleotide"
aacgcacacacacaaatccaa

SEQ ID NO: 35273 - DNA, 21 bp, Artificial Sequence
  source: /note="Description of Artificial Sequence: Synthetic oligonucleotide"
aacgcaaaagcactcgcaatg

SEQ ID NO: 35274 - DNA, 21 bp, Artificial Sequence
  source: /note="Description of Artificial Sequence: Synthetic oligonucleotide"
aacgcaaaaagcacaatcgga

SEQ ID NO: 35275 - DNA, 21 bp, Artificial Sequence
  source: /note="Description of Artificial Sequence: Synthetic oligonucleotide"
aacgcactcgcaagaagcgga

SEQ ID NO: 35276 - DNA, 21 bp, Artificial Sequence
  source: /note="Description of Artificial Sequence: Synthetic oligonucleotide"
aacgcactcgacgacaacgtc

SEQ ID NO: 35277 - DNA, 21 bp, Artificial Sequence
  source: /note="Description of Artificial Sequence: Synthetic oligonucleotide"
aacgcactcgacagaagcatg

SEQ ID NO: 35278 - DNA, 21 bp, Artificial Sequence
  source: /note="Description of Artificial Sequence: Synthetic oligonucleotide"
aacgcactcgaagcaagcgga

SEQ ID NO: 35279 - DNA, 21 bp, Artificial Sequence
  source: /note="Description of Artificial Sequence: Synthetic oligonucleotide"
aacgcactcaacccaaacttc

SEQ ID NO: 35280 - DNA, 21 bp, Artificial Sequence
  source: /note="Description of Artificial Sequence: Synthetic oligonucleotide"
aacgcactcagaagctacagc

SEQ ID NO: 35281 - DNA, 21 bp, Artificial Sequence
  source: /note="Description of Artificial Sequence: Synthetic oligonucleotide"
aacgcactcagccacgtcaca

SEQ ID NO: 35282 - DNA, 21 bp, Artificial Sequence
  source: /note="Description of Artificial Sequence: Synthetic oligonucleotide"
aacgcactcgtcagcgaaagc

SEQ ID NO: 35283 - DNA, 21 bp, Artificial Sequence
  source: /note="Description of Artificial Sequence: Synthetic oligonucleotide"
aacgcaaacggaagcagagtc

SEQ ID NO: 35284 - DNA, 21 bp, Artificial Sequence
  source: /note="Description of Artificial Sequence: Synthetic oligonucleotide"
aacgcaaaccaccaaaacgtc

SEQ ID NO: 35285 - DNA, 21 bp, Artificial Sequence
  source: /note="Description of Artificial Sequence: Synthetic oligonucleotide"
aacgcaaacctcaacagcgca

SEQ ID NO: 35286 - DNA, 21 bp, Artificial Sequence
  source: /note="Description of Artificial Sequence: Synthetic oligonucleotide"
aacgcaaacacaggaagactc

SEQ ID NO: 35287 - DNA, 21 bp, Artificial Sequence
  source: /note="Description of Artificial Sequence: Synthetic oligonucleotide"
aacgcaaacgtcccaaacaga

SEQ ID NO: 35288 - DNA, 21 bp, Artificial Sequence
  source: /note="Description of Artificial Sequence: Synthetic oligonucleotide"
aacgcaccaagaagcgcagtc

SEQ ID NO: 35289 - DNA, 21 bp, Artificial Sequence
  source: /note="Description of Artificial Sequence: Synthetic oligonucleotide"
aacgcaccaagcgaaagcaga

SEQ ID NO: 35290 - DNA, 21 bp, Artificial Sequence
  source: /note="Description of Artificial Sequence: Synthetic oligonucleotide"
aacgcacaaatcagaccaatg

SEQ ID NO: 35291 - DNA, 21 bp, Artificial Sequence
  source: /note="Description of Artificial Sequence: Synthetic oligonucleotide"
aacgcaagactcagcacaagc

SEQ ID NO: 35292 - DNA, 21 bp, Artificial Sequence
  source: /note="Description of Artificial Sequence: Synthetic oligonucleotide"
aacgcaagaatgctcgcaagc

SEQ ID NO: 35293 - DNA, 21 bp, Artificial Sequence
  source: /note="Description of Artificial Sequence: Synthetic oligonucleotide"
aacgcaagaccacacgaccca

SEQ ID NO: 35294 - DNA, 21 bp, Artificial Sequence
  source: /note="Description of Artificial Sequence: Synthetic oligonucleotide"
aacgcaagaccaagcgacatg

SEQ ID NO: 35295 - DNA, 21 bp, Artificial Sequence
  source: /note="Description of Artificial Sequence: Synthetic oligonucleotide"
aacgcaagaagcatcgactac

SEQ ID NO: 35296 - DNA, 21 bp, Artificial Sequence
  source: /note="Description of Artificial Sequence: Synthetic oligonucleotide"
aacgcaagaagcagcagctac

SEQ ID NO: 35297 - DNA, 21 bp, Artificial Sequence
  source: /note="Description of Artificial Sequence: Synthetic oligonucleotide"
aacgcaagagtcgaagcacca

SEQ ID NO: 35298 - DNA, 21 bp, Artificial Sequence
  source: /note="Description of Artificial Sequence: Synthetic oligonucleotide"
aacgcaagatacacacacagc

SEQ ID NO: 35299 - DNA, 21 bp, Artificial Sequence
  source: /note="Description of Artificial Sequence: Synthetic oligonucleotide"
aacgcaagcggactcccaaga

SEQ ID NO: 35300 - DNA, 21 bp, Artificial Sequence
  source: /note="Description of Artificial Sequence: Synthetic oligonucleotide"
aacgcaagcatccacagccac

SEQ ID NO: 35301 - DNA, 21 bp, Artificial Sequence
  source: /note="Description of Artificial Sequence: Synthetic oligonucleotide"
aacgcaagcctcccactcagc

SEQ ID NO: 35302 - DNA, 21 bp, Artificial Sequence
  source: /note="Description of Artificial Sequence: Synthetic oligonucleotide"
aacgcaagcaacagcgaaaaa

SEQ ID NO: 35303 - DNA, 21 bp, Artificial Sequence
  source: /note="Description of Artificial Sequence: Synthetic oligonucleotide"
aacgcaagcccaatcagactc

SEQ ID NO: 35304 - DNA, 21 bp, Artificial Sequence
  source: /note="Description of Artificial Sequence: Synthetic oligonucleotide"
aacgcaagcagcagaagcctc

SEQ ID NO: 35305 - DNA, 21 bp, Artificial Sequence
  source: /note="Description of Artificial Sequence: Synthetic oligonucleotide"
aacgcaagcacagtcccagaa

SEQ ID NO: 35306 - DNA, 21 bp, Artificial Sequence
  source: /note="Description of Artificial Sequence: Synthetic oligonucleotide"
aacgcaacagcagacggattc

SEQ ID NO: 35307 - DNA, 21 bp, Artificial Sequence
  source: /note="Description of Artificial Sequence: Synthetic oligonucleotide"
aacgcaacacacccaaacttc

SEQ ID NO: 35308 - DNA, 21 bp, Artificial Sequence
  source: /note="Description of Artificial Sequence: Synthetic oligonucleotide"
aacgcaacacacacaagcaca

SEQ ID NO: 35309 - DNA, 21 bp, Artificial Sequence
  source: /note="Description of Artificial Sequence: Synthetic oligonucleotide"
aacgcaacaccagtcgcagtc

SEQ ID NO: 35310 - DNA, 21 bp, Artificial Sequence
  source: /note="Description of Artificial Sequence: Synthetic oligonucleotide"
aacgcaacaagcggaagccac

SEQ ID NO: 35311 - DNA, 21 bp, Artificial Sequence
  source: /note="Description of Artificial Sequence: Synthetic oligonucleotide"
aacgcaacaagcacactctgc

SEQ ID NO: 35312 - DNA, 21 bp, Artificial Sequence
  source: /note="Description of Artificial Sequence: Synthetic oligonucleotide"
aacgcaacaagctacacaatg

SEQ ID NO: 35313 - DNA, 21 bp, Artificial Sequence
  source: /note="Description of Artificial Sequence: Synthetic oligonucleotide"
aacgcaacagtcagcccaaga

SEQ ID NO: 35314 - DNA, 21 bp, Artificial Sequence
  source: /note="Description of Artificial Sequence: Synthetic oligonucleotide"
aacgcagtcccaggaagaagc

SEQ ID NO: 35315 - DNA, 21 bp, Artificial Sequence
  source: /note="Description of Artificial Sequence: Synthetic oligonucleotide"
aacgcagtcccaatcccacca

SEQ ID NO: 35316 - DNA, 21 bp, Artificial Sequence
  source: /note="Description of Artificial Sequence: Synthetic oligonucleotide"
aacgcagtccaaagcctcatg

SEQ ID NO: 35317 - DNA, 21 bp, Artificial Sequence
  source: /note="Description of Artificial Sequence: Synthetic oligonucleotide"
aacgcagtcagcgtcaacagc

SEQ ID NO: 35318 - DNA, 21 bp, Artificial Sequence
  source: /note="Description of Artificial Sequence: Synthetic oligonucleotide"
aacgcatggaaaacaccagtc

SEQ ID NO: 35319 - DNA, 21 bp, Artificial Sequence
  source: /note="Description of Artificial Sequence: Synthetic oligonucleotide"
aacgcatacacaacaggacca

SEQ ID NO: 35320 - DNA, 21 bp, Artificial Sequence
  source: /note="Description of Artificial Sequence: Synthetic oligonucleotide"
aactgcgacgcagtcgcatgg

SEQ ID NO: 35321 - DNA, 21 bp, Artificial Sequence
  source: /note="Description of Artificial Sequence: Synthetic oligonucleotide"
aacgacgacatccaaagaaaa

SEQ ID NO: 35322 - DNA, 21 bp, Artificial Sequence
  source: /note="Description of Artificial Sequence: Synthetic oligonucleotide"
aacgacggacacagaaacttc

SEQ ID NO: 35323 - DNA, 21 bp, Artificial Sequence
  source: /note="Description of Artificial Sequence: Synthetic oligonucleotide"
aacgacatcctcctcctcagc

SEQ ID NO: 35324 - DNA, 21 bp, Artificial Sequence
  source: /note="Description of Artificial Sequence: Synthetic oligonucleotide"
aacgacatcacagaagtccca

SEQ ID NO: 35325 - DNA, 21 bp, Artificial Sequence
  source: /note="Description of Artificial Sequence: Synthetic oligonucleotide"
aacgacaaattcagactcagc

SEQ ID NO: 35326 - DNA, 21 bp, Artificial Sequence
  source: /note="Description of Artificial Sequence: Synthetic oligonucleotide"
aacgacaaaatgctccaaaga

SEQ ID NO: 35327 - DNA, 21 bp, Artificial Sequence
  source: /note="Description of Artificial Sequence: Synthetic oligonucleotide"
aacgacccaaaagtcccacaa

SEQ ID NO: 35328 - DNA, 21 bp, Artificial Sequence
  source: /note="Description of Artificial Sequence: Synthetic oligonucleotide"
aacgacccaatgacaagccaa

SEQ ID NO: 35329 - DNA, 21 bp, Artificial Sequence
  source: /note="Description of Artificial Sequence: Synthetic oligonucleotide"
aacgacagaatgaaaaacagc

SEQ ID NO: 35330 - DNA, 21 bp, Artificial Sequence
  source: /note="Description of Artificial Sequence: Synthetic oligonucleotide"
aacgacagaagcaaataccca

SEQ ID NO: 35331 - DNA, 21 bp, Artificial Sequence
  source: /note="Description of Artificial Sequence: Synthetic oligonucleotide"
aacgacagcagcctcggagca

SEQ ID NO: 35332 - DNA, 21 bp, Artificial Sequence
  source: /note="Description of Artificial Sequence: Synthetic oligonucleotide"
aacgacagcagcagcacaatg

SEQ ID NO: 35333 - DNA, 21 bp, Artificial Sequence
  source: /note="Description of Artificial Sequence: Synthetic oligonucleotide"
aacgacacattcagcagcctc

SEQ ID NO: 35334 - DNA, 21 bp, Artificial Sequence
  source: /note="Description of Artificial Sequence: Synthetic oligonucleotide"
aacgacacaggagcactcatg

SEQ ID NO: 35335 - DNA, 21 bp, Artificial Sequence
  source: /note="Description of Artificial Sequence: Synthetic oligonucleotide"
aacgacacatacagaacaagc

SEQ ID NO: 35336 - DNA, 21 bp, Artificial Sequence
  source: /note="Description of Artificial Sequence: Synthetic oligonucleotide"
aacgacgtcccaaacacacca

SEQ ID NO: 35337 - DNA, 21 bp, Artificial Sequence
  source: /note="Description of Artificial Sequence: Synthetic oligonucleotide"
aacgacgtcacaacacacaaa

SEQ ID NO: 35338 - DNA, 21 bp, Artificial Sequence
  source: /note="Description of Artificial Sequence: Synthetic oligonucleotide"
aacgactggctcatcgcagga

SEQ ID NO: 35339 - DNA, 21 bp, Artificial Sequence
  source: /note="Description of Artificial Sequence: Synthetic oligonucleotide"
aacgaagcactcagccaactc

SEQ ID NO: 35340 - DNA, 21 bp, Artificial Sequence
  source: /note="Description of Artificial Sequence: Synthetic oligonucleotide"
aacgaagcagtcgcaagcatg

SEQ ID NO: 35341 - DNA, 21 bp, Artificial Sequence
  source: /note="Description of Artificial Sequence: Synthetic oligonucleotide"
aacgaatgcgacgacctcatg

SEQ ID NO: 35342 - DNA, 21 bp, Artificial Sequence
  source: /note="Description of Artificial Sequence: Synthetic oligonucleotide"
aacgaaggattcctcctcgga

SEQ ID NO: 35343 - DNA, 21 bp, Artificial Sequence
  source: /note="Description of Artificial Sequence: Synthetic oligonucleotide"
aacgaacaccacaaaacagaa

SEQ ID NO: 35344 - DNA, 21 bp, Artificial Sequence
  source: /note="Description of Artificial Sequence: Synthetic oligonucleotide"
aacgaaatcttcacaccaatg

SEQ ID NO: 35345 - DNA, 21 bp, Artificial Sequence
  source: /note="Description of Artificial Sequence: Synthetic oligonucleotide"
aacgaactcgcaagcagagca

SEQ ID NO: 35346 - DNA, 21 bp, Artificial Sequence
  source: /note="Description of Artificial Sequence: Synthetic oligonucleotide"
aacgaactcggaggacaccac

SEQ ID NO: 35347 - DNA, 21 bp, Artificial Sequence
  source: /note="Description of Artificial Sequence: Synthetic oligonucleotide"
aacgaactcgtcagcaaaaca

SEQ ID NO: 35348 - DNA, 21 bp, Artificial Sequence
  source: /note="Description of Artificial Sequence: Synthetic oligonucleotide"
aacgaaatgagcggacaaaga

SEQ ID NO: 35349 - DNA, 21 bp, Artificial Sequence
  source: /note="Description of Artificial Sequence: Synthetic oligonucleotide"
aacgaaccactcggaatgaga

SEQ ID NO: 35350 - DNA, 21 bp, Artificial Sequence
  source: /note="Description of Artificial Sequence: Synthetic oligonucleotide"
aacgaacaacacgcaacacac

SEQ ID NO: 35351 - DNA, 21 bp, Artificial Sequence
  source: /note="Description of Artificial Sequence: Synthetic oligonucleotide"
aacgaaagaggaagcagctgg

SEQ ID NO: 35352 - DNA, 21 bp, Artificial Sequence
  source: /note="Description of Artificial Sequence: Synthetic oligonucleotide"
aacgaaagacaccaccaagtc

SEQ ID NO: 35353 - DNA, 21 bp, Artificial Sequence
  source: /note="Description of Artificial Sequence: Synthetic oligonucleotide"
aacgaaagaaacgtccaactc

SEQ ID NO: 35354 - DNA, 21 bp, Artificial Sequence
  source: /note="Description of Artificial Sequence: Synthetic oligonucleotide"
aacgaaagaagagtcgtcctc

SEQ ID NO: 35355 - DNA, 21 bp, Artificial Sequence
  source: /note="Description of Artificial Sequence: Synthetic oligonucleotide"
aacgaaagccacaaaaacgtc

SEQ ID NO: 35356 - DNA, 21 bp, Artificial Sequence
  source: /note="Description of Artificial Sequence: Synthetic oligonucleotide"
aacgaaagcctcagaacagca

SEQ ID NO: 35357 - DNA, 21 bp, Artificial Sequence
  source: /note="Description of Artificial Sequence: Synthetic oligonucleotide"
aacgaaagcctcacaagcgca

SEQ ID NO: 35358 - DNA, 21 bp, Artificial Sequence
  source: /note="Description of Artificial Sequence: Synthetic oligonucleotide"
aacgaaagcgtcagaagctac

SEQ ID NO: 35359 - DNA, 21 bp, Artificial Sequence
  source: /note="Description of Artificial Sequence: Synthetic oligonucleotide"
aacgaatacgtcctcggactc

SEQ ID NO: 35360 - DNA, 21 bp, Artificial Sequence
  source: /note="Description of Artificial Sequence: Synthetic oligonucleotide"
aacttcgcagcaagaagctac

SEQ ID NO: 35361 - DNA, 21 bp, Artificial Sequence
  source: /note="Description of Artificial Sequence: Synthetic oligonucleotide"
aacttcgacagacacggagca

SEQ ID NO: 35362 - DNA, 21 bp, Artificial Sequence
  source: /note="Description of Artificial Sequence: Synthetic oligonucleotide"
aacttcgacagaccaagaaca

SEQ ID NO: 35363 - DNA, 21 bp, Artificial Sequence
  source: /note="Description of Artificial Sequence: Synthetic oligonucleotide"
aacttcaacacaagagtcgca

SEQ ID NO: 35364 - DNA, 21 bp, Artificial Sequence
  source: /note="Description of Artificial Sequence: Synthetic oligonucleotide"
aacttcagagtcagcagcgga

SEQ ID NO: 35365 - DNA, 21 bp, Artificial Sequence
  source: /note="Description of Artificial Sequence: Synthetic oligonucleotide"
aacttcagcccaacaagccca

SEQ ID NO: 35366 - DNA, 21 bp, Artificial Sequence
  source: /note="Description of Artificial Sequence: Synthetic oligonucleotide"
aacttcacaaaagcaggagca

SEQ ID NO: 35367 - DNA, 21 bp, Artificial Sequence
  source: /note="Description of Artificial Sequence: Synthetic oligonucleotide"
aacttcacaaaaagcgcagga

SEQ ID NO: 35368 - DNA, 21 bp, Artificial Sequence
  source: /note="Description of Artificial Sequence: Synthetic oligonucleotide"
aacttcacactcaaaccaatc

SEQ ID NO: 35369 - DNA, 21 bp, Artificial Sequence
  source: /note="Description of Artificial Sequence: Synthetic oligonucleotide"
aacttcgtcggagtcccaaca

SEQ ID NO: 35370 - DNA, 21 bp, Artificial Sequence
  source: /note="Description of Artificial Sequence: Synthetic oligonucleotide"
aacttcgtcgtcccaagcgac

SEQ ID NO: 35371 - DNA, 21 bp, Artificial Sequence
  source: /note="Description of Artificial Sequence: Synthetic oligonucleotide"
aacggagcagcagaagtcgca

SEQ ID NO: 35372 - DNA, 21 bp, Artificial Sequence
  source: /note="Description of Artificial Sequence: Synthetic oligonucleotide"
aacggagcagacagagcaagc

SEQ ID NO: 35373 - DNA, 21 bp, Artificial Sequence
  source: /note="Description of Artificial Sequence: Synthetic oligonucleotide"
aacggagcaggactcacaatc

SEQ ID NO: 35374 - DNA, 21 bp, Artificial Sequence
  source: /note="Description of Artificial Sequence: Synthetic oligonucleotide"
aacggagcactcagactccca

SEQ ID NO: 35375 - DNA, 21 bp, Artificial Sequence
  source: /note="Description of Artificial Sequence: Synthetic oligonucleotide"
aacggagacgcatgcccaagc

SEQ ID NO: 35376 - DNA, 21 bp, Artificial Sequence
  source: /note="Description of Artificial Sequence: Synthetic oligonucleotide"
aacggagaagcacaagcaaga

SEQ ID NO: 35377 - DNA, 21 bp, Artificial Sequence
  source: /note="Description of Artificial Sequence: Synthetic oligonucleotide"
aacggagaaccattcagcatc

SEQ ID NO: 35378 - DNA, 21 bp, Artificial Sequence
  source: /note="Description of Artificial Sequence: Synthetic oligonucleotide"
aacggaggagcatacacactc

SEQ ID NO: 35379 - DNA, 21 bp, Artificial Sequence
  source: /note="Description of Artificial Sequence: Synthetic oligonucleotide"
aacggaggaatcagcagaaca

SEQ ID NO: 35380 - DNA, 21 bp, Artificial Sequence
  source: /note="Description of Artificial Sequence: Synthetic oligonucleotide"
aacggaggaaacctcctcctc

SEQ ID NO: 35381 - DNA, 21 bp, Artificial Sequence
  source: /note="Description of Artificial Sequence: Synthetic oligonucleotide"
aacggacacttcgtcgacgca

SEQ ID NO: 35382 - DNA, 21 bp, Artificial Sequence
  source: /note="Description of Artificial Sequence: Synthetic oligonucleotide"
aacggacacaaccacatgctc

SEQ ID NO: 35383 - DNA, 21 bp, Artificial Sequence
  source: /note="Description of Artificial Sequence: Synthetic oligonucleotide"
aacggacacagcgtcagcgaa

SEQ ID NO: 35384 - DNA, 21 bp, Artificial Sequence
  source: /note="Description of Artificial Sequence: Synthetic oligonucleotide"
aacggaaaaaacggaagcaca

SEQ ID NO: 35385 - DNA, 21 bp, Artificial Sequence
  source: /note="Description of Artificial Sequence: Synthetic oligonucleotide"
aacggactccaaacaggagtc

SEQ ID NO: 35386 - DNA, 21 bp, Artificial Sequence
  source: /note="Description of Artificial Sequence: Synthetic oligonucleotide"
aacggaatgggagcagtcgtc

SEQ ID NO: 35387 - DNA, 21 bp, Artificial Sequence
  source: /note="Description of Artificial Sequence: Synthetic oligonucleotide"
aacggaatgcaaccactcaac

SEQ ID NO: 35388 - DNA, 21 bp, Artificial Sequence
  source: /note="Description of Artificial Sequence: Synthetic oligonucleotide"
aacggaatgtacccataccca

SEQ ID NO: 35389 - DNA, 21 bp, Artificial Sequence
  source: /note="Description of Artificial Sequence: Synthetic oligonucleotide"
aacggaaacgaagtcctcagc

SEQ ID NO: 35390 - DNA, 21 bp, Artificial Sequence
  source: /note="Description of Artificial Sequence: Synthetic oligonucleotide"
aacggaccacacagaatggtc

SEQ ID NO: 35391 - DNA, 21 bp, Artificial Sequence
  source: /note="Description of Artificial Sequence: Synthetic oligonucleotide"
aacggaccaccagcagtcgga

SEQ ID NO: 35392 - DNA, 21 bp, Artificial Sequence
  source: /note="Description of Artificial Sequence: Synthetic oligonucleotide"
aacggaccaccaaaaggaatc

SEQ ID NO: 35393 - DNA, 21 bp, Artificial Sequence
  source: /note="Description of Artificial Sequence: Synthetic oligonucleotide"
aacggaccaagcgcacaacaa

SEQ ID NO: 35394 - DNA, 21 bp, Artificial Sequence
  source: /note="Description of Artificial Sequence: Synthetic oligonucleotide"
aacggacaagcagaaccagca

SEQ ID NO: 35395 - DNA, 21 bp, Artificial Sequence
  source: /note="Description of Artificial Sequence: Synthetic oligonucleotide"
aacggaagccacatcgacaga

SEQ ID NO: 35396 - DNA, 21 bp, Artificial Sequence
  source: /note="Description of Artificial Sequence: Synthetic oligonucleotide"
aacggaagctgggtcccagca

SEQ ID NO: 35397 - DNA, 21 bp, Artificial Sequence
  source: /note="Description of Artificial Sequence: Synthetic oligonucleotide"
aacggaagctaccaaccacca

SEQ ID NO: 35398 - DNA, 21 bp, Artificial Sequence
  source: /note="Description of Artificial Sequence: Synthetic oligonucleotide"
aacggaacacaactcctcagc

SEQ ID NO: 35399 - DNA, 21 bp, Artificial Sequence
  source: /note="Description of Artificial Sequence: Synthetic oligonucleotide"
aacggaacaacagcactcttc

SEQ ID NO: 35400 - DNA, 21 bp, Artificial Sequence
  source: /note="Description of Artificial Sequence: Synthetic oligonucleotide"
aacggaacatacagcgtcgaa

SEQ ID NO: 35401 - DNA, 21 bp, Artificial Sequence
  source: /note="Description of Artificial Sequence: Synthetic oligonucleotide"
aacggagtcctcctccacgca

SEQ ID NO: 35402 - DNA, 21 bp, Artificial Sequence
  source: /note="Description of Artificial Sequence: Synthetic oligonucleotide"
aacggagtcccaagcctcgga

SEQ ID NO: 35403 - DNA, 21 bp, Artificial Sequence
  source: /note="Description of Artificial Sequence: Synthetic oligonucleotide"
aacggatacgcagtcagcgca

SEQ ID NO: 35404 - DNA, 21 bp, Artificial Sequence
  source: /note="Description of Artificial Sequence: Synthetic oligonucleotide"
aacggatacacaagagacgaa

SEQ ID NO: 35405 - DNA, 21 bp, Artificial Sequence
  source: /note="Description of Artificial Sequence: Synthetic oligonucleotide"
aaccacgcaagcaacacaaca

SEQ ID NO: 35406 - DNA, 21 bp, Artificial Sequence
  source: /note="Description of Artificial Sequence: Synthetic oligonucleotide"
aaccaccacaacgcatacagc

SEQ ID NO: 35407 - DNA, 21 bp, Artificial Sequence
  source: /note="Description of Artificial Sequence: Synthetic oligonucleotide"
aaccacatcacatacgaaaac

SEQ ID NO: 35408 - DNA, 21 bp, Artificial Sequence
  source: /note="Description of Artificial Sequence: Synthetic oligonucleotide"
aaccacaaatgcgcagacgaa

SEQ ID NO: 35409 - DNA, 21 bp, Artificial Sequence
  source: /note="Description of Artificial Sequence: Synthetic oligonucleotide"
aaccacaaaggactcaacctc

SEQ ID NO: 35410 - DNA, 21 bp, Artificial Sequence
  source: /note="Description of Artificial Sequence: Synthetic oligonucleotide"
aaccacatgccaagcgtctac

SEQ ID NO: 35411 - DNA, 21 bp, Artificial Sequence
  source: /note="Description of Artificial Sequence: Synthetic oligonucleotide"
aaccacaacggactccaaatg

SEQ ID NO: 35412 - DNA, 21 bp, Artificial Sequence
  source: /note="Description of Artificial Sequence: Synthetic oligonucleotide"
aaccacaacagaccagcaaac

SEQ ID NO: 35413 - DNA, 21 bp, Artificial Sequence
  source: /note="Description of Artificial Sequence: Synthetic oligonucleotide"
aaccacccaagcgcaagcaca

SEQ ID NO: 35414 - DNA, 21 bp, Artificial Sequence
  source: /note="Description of Artificial Sequence: Synthetic oligonucleotide"
aaccacccagtcccaagcagc

SEQ ID NO: 35415 - DNA, 21 bp, Artificial Sequence
  source: /note="Description of Artificial Sequence: Synthetic oligonucleotide"
aaccacccatacccaaaaatg

SEQ ID NO: 35416 - DNA, 21 bp, Artificial Sequence
  source: /note="Description of Artificial Sequence: Synthetic oligonucleotide"
aaccaccaactcgtcagcgaa

SEQ ID NO: 35417 - DNA, 21 bp, Artificial Sequence
  source: /note="Description of Artificial Sequence: Synthetic oligonucleotide"
aaccacagagcaagcccatac

SEQ ID NO: 35418 - DNA, 21 bp, Artificial Sequence
  source: /note="Description of Artificial Sequence: Synthetic oligonucleotide"
aaccacagaacaggaaacgca

SEQ ID NO: 35419 - DNA, 21 bp, Artificial Sequence
  source: /note="Description of Artificial Sequence: Synthetic oligonucleotide"
aaccacagaacaagcggaagc

SEQ ID NO: 35420 - DNA, 21 bp, Artificial Sequence
  source: /note="Description of Artificial Sequence: Synthetic oligonucleotide"
aaccacagcgcagaaatgagc

SEQ ID NO: 35421 - DNA, 21 bp, Artificial Sequence
  source: /note="Description of Artificial Sequence: Synthetic oligonucleotide"
aaccacagcgaaacactcatg

SEQ ID NO: 35422 - DNA, 21 bp, Artificial Sequence
  source: /note="Description of Artificial Sequence: Synthetic oligonucleotide"
aaccacagcggaacaatcgtc

SEQ ID NO: 35423 - DNA, 21 bp, Artificial Sequence
  source: /note="Description of Artificial Sequence: Synthetic oligonucleotide"
aaccacagcccagtcccactc

SEQ ID NO: 35424 - DNA, 21 bp, Artificial Sequence
  source: /note="Description of Artificial Sequence: Synthetic oligonucleotide"
aaccacagcagcgacggagca

SEQ ID NO: 35425 - DNA, 21 bp, Artificial Sequence
  source: /note="Description of Artificial Sequence: Synthetic oligonucleotide"
aaccacacaggaagcacactc

SEQ ID NO: 35426 - DNA, 21 bp, Artificial Sequence
  source: /note="Description of Artificial Sequence: Synthetic oligonucleotide"
aaccacacaccaagcatccca

SEQ ID NO: 35427 - DNA, 21 bp, Artificial Sequence
  source: /note="Description of Artificial Sequence: Synthetic oligonucleotide"
aaccacgtcgcaaaaagctgg

SEQ ID NO: 35428 - DNA, 21 bp, Artificial Sequence
  source: /note="Description of Artificial Sequence: Synthetic oligonucleotide"
aaccactacaacgtcaacgaa

SEQ ID NO: 35429 - DNA, 21 bp, Artificial Sequence
  source: /note="Description of Artificial Sequence: Synthetic oligonucleotide"
aacatcgcaaacgcactcaac

SEQ ID NO: 35430 - DNA, 21 bp, Artificial Sequence
  source: /note="Description of Artificial Sequence: Synthetic oligonucleotide"
aacatcttcgacgacgcagac

SEQ ID NO: 35431 - DNA, 21 bp, Artificial Sequence
  source: /note="Description of Artificial Sequence: Synthetic oligonucleotide"
aacatcggagcaacaccaagc

SEQ ID NO: 35432 - DNA, 21 bp, Artificial Sequence
  source: /note="Description of Artificial Sequence: Synthetic oligonucleotide"
aacatcggaggaatgatgagc

SEQ ID NO: 35433 - DNA, 21 bp, Artificial Sequence
  source: /note="Description of Artificial Sequence: Synthetic oligonucleotide"
aacatcggaatgacaacagga

SEQ ID NO: 35434 - DNA, 21 bp, Artificial Sequence
  source: /note="Description of Artificial Sequence: Synthetic oligonucleotide"
aacatcaaacacggaccacac

SEQ ID NO: 35435 - DNA, 21 bp, Artificial Sequence
  source: /note="Description of Artificial Sequence: Synthetic oligonucleotide"
aacatcaaactcggacacgac

SEQ ID NO: 35436 - DNA, 21 bp, Artificial Sequence
  source: /note="Description of Artificial Sequence: Synthetic oligonucleotide"
aacatcctccaatacacaagc

SEQ ID NO: 35437 - DNA, 21 bp, Artificial Sequence
  source: /note="Description of Artificial Sequence: Synthetic oligonucleotide"
aacatcctcagaacagacgaa

SEQ ID NO: 35438 - DNA, 21 bp, Artificial Sequence
  source: /note="Description of Artificial Sequence: Synthetic oligonucleotide"
aacatcccagacagattcatc

SEQ ID NO: 35439 - DNA, 21 bp, Artificial Sequence
  source: /note="Description of Artificial Sequence: Synthetic oligonucleotide"
aacatcccactcggagcagca

SEQ ID NO: 35440 - DNA, 21 bp, Artificial Sequence
  source: /note="Description of Artificial Sequence: Synthetic oligonucleotide"
aacatcccaccaagaccactc

SEQ ID NO: 35441 - DNA, 21 bp, Artificial Sequence
  source: /note="Description of Artificial Sequence: Synthetic oligonucleotide"
aacatccaagtcagaagcgga

SEQ ID NO: 35442 - DNA, 21 bp, Artificial Sequence
  source: /note="Description of Artificial Sequence: Synthetic oligonucleotide"
aacatcagagacctcgtccac

SEQ ID NO: 35443 - DNA, 21 bp, Artificial Sequence
  source: /note="Description of Artificial Sequence: Synthetic oligonucleotide"
aacatcagaacaaacaacatc

SEQ ID NO: 35444 - DNA, 21 bp, Artificial Sequence
  source: /note="Description of Artificial Sequence: Synthetic oligonucleotide"
aacatcagcctcccactcctc

SEQ ID NO: 35445 - DNA, 21 bp, Artificial Sequence
  source: /note="Description of Artificial Sequence: Synthetic oligonucleotide"
aacatcagctacacaatcgaa

SEQ ID NO: 35446 - DNA, 21 bp, Artificial Sequence
  source: /note="Description of Artificial Sequence: Synthetic oligonucleotide"
aacatcacactcgcacacctc

SEQ ID NO: 35447 - DNA, 21 bp, Artificial Sequence
  source: /note="Description of Artificial Sequence: Synthetic oligonucleotide"
aacatcacaagcaacgaaagc

SEQ ID NO: 35448 - DNA, 21 bp, Artificial Sequence
  source: /note="Description of Artificial Sequence: Synthetic oligonucleotide"
aacatcacaacaagaggaaca

SEQ ID NO: 35449 - DNA, 21 bp, Artificial Sequence
  source: /note="Description of Artificial Sequence: Synthetic oligonucleotide"
aacatcgtcgaaagaagcaga

SEQ ID NO: 35450 - DNA, 21 bp, Artificial Sequence
  source: /note="Description of Artificial Sequence: Synthetic oligonucleotide"
aacaaagcactcacacacatg

SEQ ID NO: 35451 - DNA, 21 bp, Artificial Sequence
  source: /note="Description of Artificial Sequence: Synthetic oligonucleotide"
aacaaagaacacgtccaagga

SEQ ID NO: 35452 - DNA, 21 bp, Artificial Sequence
  source: /note="Description of Artificial Sequence: Synthetic oligonucleotide"
aacaaagaaccaacagacagc

SEQ ID NO: 35453 - DNA, 21 bp, Artificial Sequence
  source: /note="Description of Artificial Sequence: Synthetic oligonucleotide"
aacaaagaagtccacaacagc

SEQ ID NO: 35454 - DNA, 21 bp, Artificial Sequence
  source: /note="Description of Artificial Sequence: Synthetic oligonucleotide"
aacaaaggagtctacagcgga

SEQ ID NO: 35455 - DNA, 21 bp, Artificial Sequence
  source: /note="Description of Artificial Sequence: Synthetic oligonucleotide"
aacaaacacttccaagcacac

SEQ ID NO: 35456 - DNA, 21 bp, Artificial Sequence
  source: /note="Description of Artificial Sequence: Synthetic oligonucleotide"
aacaaaatcgacccatacaca

SEQ ID NO: 35457 - DNA, 21 bp, Artificial Sequence
  source: /note="Description of Artificial Sequence: Synthetic oligonucleotide"
aacaaaatgacaacatacgca

SEQ ID NO: 35458 - DNA, 21 bp, Artificial Sequence
  source: /note="Description of Artificial Sequence: Synthetic oligonucleotide"
aacaaacaattcacaccagaa

SEQ ID NO: 35459 - DNA, 21 bp, Artificial Sequence
  source: /note="Description of Artificial Sequence: Synthetic oligonucleotide"
aacaaaagcatcaacacagac

SEQ ID NO: 35460 - DNA, 21 bp, Artificial Sequence
  source: /note="Description of Artificial Sequence: Synthetic oligonucleotide"
aacaaaagcctcacaacagga

SEQ ID NO: 35461 - DNA, 21 bp, Artificial Sequence
  source: /note="Description of Artificial Sequence: Synthetic oligonucleotide"
aacaaaagcatgaacgtccca

SEQ ID NO: 35462 - DNA, 21 bp, Artificial Sequence
  source: /note="Description of Artificial Sequence: Synthetic oligonucleotide"
aacaaaacagacaacgtcagc

SEQ ID NO: 35463 - DNA, 21 bp, Artificial Sequence
  source: /note="Description of Artificial Sequence: Synthetic oligonucleotide"
aacaaaacacaaagcagacac

SEQ ID NO: 35464 - DNA, 21 bp, Artificial Sequence
  source: /note="Description of Artificial Sequence: Synthetic oligonucleotide"
aacaaagtcctccacgcacca

SEQ ID NO: 35465 - DNA, 21 bp, Artificial Sequence
  source: /note="Description of Artificial Sequence: Synthetic oligonucleotide"
aacaaagtcagcggaccaatg

SEQ ID NO: 35466 - DNA, 21 bp, Artificial Sequence
  source: /note="Description of Artificial Sequence: Synthetic oligonucleotide"
aacaaataccaagacctcaga

SEQ ID NO: 35467 - DNA, 21 bp, Artificial Sequence
  source: /note="Description of Artificial Sequence: Synthetic oligonucleotide"
aacctcgcacacacaaaattc

SEQ ID NO: 35468 - DNA, 21 bp, Artificial Sequence
  source: /note="Description of Artificial Sequence: Synthetic oligonucleotide"
aacctcgcactcgacgcaaga

SEQ ID NO: 35469 - DNA, 21 bp, Artificial Sequence
  source: /note="Description of Artificial Sequence: Synthetic oligonucleotide"
aacctcgcaccaatccaaaga

SEQ ID NO: 35470 - DNA, 21 bp, Artificial Sequence
  source: /note="Description of Artificial Sequence: Synthetic oligonucleotide"
aacctcgacagaccagtcaca

SEQ ID NO: 35471 - DNA, 21 bp, Artificial Sequence
  source: /note="Description of Artificial Sequence: Synthetic oligonucleotide"
aacctcgaaacaatcccaaga

SEQ ID NO: 35472 - DNA, 21 bp, Artificial Sequence
  source: /note="Description of Artificial Sequence: Synthetic oligonucleotide"
aacctcggaggaagcgtcgaa

SEQ ID NO: 35473 - DNA, 21 bp, Artificial Sequence
  source: /note="Description of Artificial Sequence: Synthetic oligonucleotide"
aacctcggaaaaaaagaactc

SEQ ID NO: 35474 - DNA, 21 bp, Artificial Sequence
  source: /note="Description of Artificial Sequence: Synthetic oligonucleotide"
aacctcggaccaacactccca

SEQ ID NO: 35475 - DNA, 21 bp, Artificial Sequence
  source: /note="Description of Artificial Sequence: Synthetic oligonucleotide"
aacctcggaccatacccactc

SEQ ID NO: 35476 - DNA, 21 bp, Artificial Sequence
  source: /note="Description of Artificial Sequence: Synthetic oligonucleotide"
aacctccacctcatcagcgca

SEQ ID NO: 35477 - DNA, 21 bp, Artificial Sequence
  source: /note="Description of Artificial Sequence: Synthetic oligonucleotide"
aacctccacctcccaagcagc

SEQ ID NO: 35478 - DNA, 21 bp, Artificial Sequence
  source: /note="Description of Artificial Sequence: Synthetic oligonucleotide"
aacctccacagaacaccagac

SEQ ID NO: 35479 - DNA, 21 bp, Artificial Sequence
  source: /note="Description of Artificial Sequence: Synthetic oligonucleotide"
aacctccacagcacaacagca

SEQ ID NO: 35480 - DNA, 21 bp, Artificial Sequence
  source: /note="Description of Artificial Sequence: Synthetic oligonucleotide"
aacctcatcgcaatgggaagc

SEQ ID NO: 35481 - DNA, 21 bp, Artificial Sequence
  source: /note="Description of Artificial Sequence: Synthetic oligonucleotide"
aacctcatcccaacaaaagca

SEQ ID NO: 35482 - DNA, 21 bp, Artificial Sequence
  source: /note="Description of Artificial Sequence: Synthetic oligonucleotide"
aacctcaaactcatgagcgga

SEQ ID NO: 35483 - DNA, 21 bp, Artificial Sequence
  source: /note="Description of Artificial Sequence: Synthetic oligonucleotide"
aacctcaaagtcctcgtcaca

SEQ ID NO: 35484 - DNA, 21 bp, Artificial Sequence
  source: /note="Description of Artificial Sequence: Synthetic oligonucleotide"
aacctcaaagtcacaagagac

SEQ ID NO: 35485 - DNA, 21 bp, Artificial Sequence
  source: /note="Description of Artificial Sequence: Synthetic oligonucleotide"
aacctcctcgacgtccacctc

SEQ ID NO: 35486 - DNA, 21 bp, Artificial Sequence
  source: /note="Description of Artificial Sequence: Synthetic oligonucleotide"
aacctcctcggacacgcagtc

SEQ ID NO: 35487 - DNA, 21 bp, Artificial Sequence
  source: /note="Description of Artificial Sequence: Synthetic oligonucleotide"
aacctcctcacaaacgcagtc

SEQ ID NO: 35488 - DNA, 21 bp, Artificial Sequence
  source: /note="Description of Artificial Sequence: Synthetic oligonucleotide"
aacctcaacgcaacaagcgtc

SEQ ID NO: 35489 - DNA, 21 bp, Artificial Sequence
  source: /note="Description of Artificial Sequence: Synthetic oligonucleotide"
aacctcccaccaagcagccca

SEQ ID NO: 35490 - DNA, 21 bp, Artificial Sequence
  source: /note="Description of Artificial Sequence: Synthetic oligonucleotide"
aacctcccaagaccaagcctc

SEQ ID NO: 35491 - DNA, 21 bp, Artificial Sequence
  source: /note="Description of Artificial Sequence: Synthetic oligonucleotide"
aacctcccaagaagaacagac

SEQ ID NO: 35492 - DNA, 21 bp, Artificial Sequence
  source: /note="Description of Artificial Sequence: Synthetic oligonucleotide"
aacctcccatacagcctcgtc

SEQ ID NO: 35493 - DNA, 21 bp, Artificial Sequence
  source: /note="Description of Artificial Sequence: Synthetic oligonucleotide"
aacctcccatacacacaagca

SEQ ID NO: 35494 - DNA, 21 bp, Artificial Sequence
  source: /note="Description of Artificial Sequence: Synthetic oligonucleotide"
aacctccaactcacaaacgga

SEQ ID NO: 35495 - DNA, 21 bp, Artificial Sequence
  source: /note="Description of Artificial Sequence: Synthetic oligonucleotide"
aacctcagagacggaggaaca

SEQ ID NO: 35496 - DNA, 21 bp, Artificial Sequence
  source: /note="Description of Artificial Sequence: Synthetic oligonucleotide"
aacctcagaggaaacccagca

SEQ ID NO: 35497 - DNA, 21 bp, Artificial Sequence
  source: /note="Description of Artificial Sequence: Synthetic oligonucleotide"
aacctcagaatgcaaatccca

SEQ ID NO: 35498 - DNA, 21 bp, Artificial Sequence
  source: /note="Description of Artificial Sequence: Synthetic oligonucleotide"
aacctcagaccaatgagcagc

SEQ ID NO: 35499 - DNA, 21 bp, Artificial Sequence
  source: /note="Description of Artificial Sequence: Synthetic oligonucleotide"
aacctcagcgacgacagagaa

SEQ ID NO: 35500 - DNA, 21 bp, Artificial Sequence
  source: /note="Description of Artificial Sequence: Synthetic oligonucleotide"
aacctcagcgacagcagaagc

SEQ ID NO: 35501 - DNA, 21 bp, Artificial Sequence
  source: /note="Description of Artificial Sequence: Synthetic oligonucleotide"
aacctcagccacggagtcctc

SEQ ID NO: 35502 - DNA, 21 bp, Artificial Sequence
  source: /note="Description of Artificial Sequence: Synthetic oligonucleotide"
aacctcagccacagaccaatg

SEQ ID NO: 35503 - DNA, 21 bp, Artificial Sequence
  source: /note="Description of Artificial Sequence: Synthetic oligonucleotide"
aacctcagcatgggaagccca

SEQ ID NO: 35504 - DNA, 21 bp, Artificial Sequence
  source: /note="Description of Artificial Sequence: Synthetic oligonucleotide"
aacctcagcaacagcgtcaaa

SEQ ID NO: 35505 - DNA, 21 bp, Artificial Sequence
  source: /note="Description of Artificial Sequence: Synthetic oligonucleotide"
aacctcagcccatacccaatg

SEQ ID NO: 35506 - DNA, 21 bp, Artificial Sequence
  source: /note="Description of Artificial Sequence: Synthetic oligonucleotide"
aacctcagcccatacacaatg

SEQ ID NO: 35507 - DNA, 21 bp, Artificial Sequence
  source: /note="Description of Artificial Sequence: Synthetic oligonucleotide"
aacctcagcagagacagcaca

SEQ ID NO: 35508 - DNA, 21 bp, Artificial Sequence
  source: /note="Description of Artificial Sequence: Synthetic oligonucleotide"
aacctcagcagcggacaagtc

SEQ ID NO: 35509 - DNA, 21 bp, Artificial Sequence
  source: /note="Description of Artificial Sequence: Synthetic oligonucleotide"
aacctcagctacacacaacaa

SEQ ID NO: 35510 - DNA, 21 bp, Artificial Sequence
  source: /note="Description of Artificial Sequence: Synthetic oligonucleotide"
aacctcacagcaggaccacca

SEQ ID NO: 35511 - DNA, 21 bp, Artificial Sequence
  source: /note="Description of Artificial Sequence: Synthetic oligonucleotide"
aacctcacaggaggaagcagc

SEQ ID NO: 35512 - DNA, 21 bp, Artificial Sequence
  source: /note="Description of Artificial Sequence: Synthetic oligonucleotide"
aacctcacacacacagtcatg

SEQ ID NO: 35513 - DNA, 21 bp, Artificial Sequence
  source: /note="Description of Artificial Sequence: Synthetic oligonucleotide"
aacctcacaaacagcagcatg

SEQ ID NO: 35514 - DNA, 21 bp, Artificial Sequence
  source: /note="Description of Artificial Sequence: Synthetic oligonucleotide"
aacctcacaagaatgatccac

SEQ ID NO: 35515 - DNA, 21 bp, Artificial Sequence
  source: /note="Description of Artificial Sequence: Synthetic oligonucleotide"
aacctcacagtcaaagtccaa

SEQ ID NO: 35516 - DNA, 21 bp, Artificial Sequence
  source: /note="Description of Artificial Sequence: Synthetic oligonucleotide"
aacctcgtccaattcgtccac

SEQ ID NO: 35517 - DNA, 21 bp, Artificial Sequence
  source: /note="Description of Artificial Sequence: Synthetic oligonucleotide"
aacctcgtccaaaacaaacca

SEQ ID NO: 35518 - DNA, 21 bp, Artificial Sequence
  source: /note="Description of Artificial Sequence: Synthetic oligonucleotide"
aacctctacgcatacgaccca

SEQ ID NO: 35519 - DNA, 21 bp, Artificial Sequence
  source: /note="Description of Artificial Sequence: Synthetic oligonucleotide"
aacctctacacaccataccca

SEQ ID NO: 35520 - DNA, 21 bp, Artificial Sequence
  source: /note="Description of Artificial Sequence: Synthetic oligonucleotide"
aacatggcacacagcccacca

SEQ ID NO: 35521 - DNA, 21 bp, Artificial Sequence
  source: /note="Description of Artificial Sequence: Synthetic oligonucleotide"
aacatggcacacgtccaatac

SEQ ID NO: 35522 - DNA, 21 bp, Artificial Sequence
  source: /note="Description of Artificial Sequence: Synthetic oligonucleotide"
aacatggcaatcgtcgaacaa

SEQ ID NO: 35523 - DNA, 21 bp, Artificial Sequence
  source: /note="Description of Artificial Sequence: Synthetic oligonucleotide"
aacatggcaacaatcagagtc

SEQ ID NO: 35524 - DNA, 21 bp, Artificial Sequence
  source: /note="Description of Artificial Sequence: Synthetic oligonucleotide"
aacatgcacatcagaagcaca

SEQ ID NO: 35525 - DNA, 21 bp, Artificial Sequence
  source: /note="Description of Artificial Sequence: Synthetic oligonucleotide"
aacatgcacacaagaacaagc

SEQ ID NO: 35526 - DNA, 21 bp, Artificial Sequence
  source: /note="Description of Artificial Sequence: Synthetic oligonucleotide"
aacatgatcgcactccaaaca

SEQ ID NO: 35527 - DNA, 21 bp, Artificial Sequence
  source: /note="Description of Artificial Sequence: Synthetic oligonucleotide"
aacatgaaagcaagcagcgtc

SEQ ID NO: 35528 - DNA, 21 bp, Artificial Sequence
  source: /note="Description of Artificial Sequence: Synthetic oligonucleotide"
aacatgctcacagacagagtc

SEQ ID NO: 35529 - DNA, 21 bp, Artificial Sequence
  source: /note="Description of Artificial Sequence: Synthetic oligonucleotide"
aacatgccaaacacaagccac

SEQ ID NO: 35530 - DNA, 21 bp, Artificial Sequence
  source: /note="Description of Artificial Sequence: Synthetic oligonucleotide"
aacatgccaagacacggactc

SEQ ID NO: 35531 - DNA, 21 bp, Artificial Sequence
  source: /note="Description of Artificial Sequence: Synthetic oligonucleotide"
aacatgccagtcggaagcaca

SEQ ID NO: 35532 - DNA, 21 bp, Artificial Sequence
  source: /note="Description of Artificial Sequence: Synthetic oligonucleotide"
aacatgcaaggaacaaaccca

SEQ ID NO: 35533 - DNA, 21 bp, Artificial Sequence
  source: /note="Description of Artificial Sequence: Synthetic oligonucleotide"
aacatgagagacacagcaagc

SEQ ID NO: 35534 - DNA, 21 bp, Artificial Sequence
  source: /note="Description of Artificial Sequence: Synthetic oligonucleotide"
aacatgagactcgaccaagga

SEQ ID NO: 35535 - DNA, 21 bp, Artificial Sequence
  source: /note="Description of Artificial Sequence: Synthetic oligonucleotide"
aacatgagaccacacacagga

SEQ ID NO: 35536 - DNA, 21 bp, Artificial Sequence
  source: /note="Description of Artificial Sequence: Synthetic oligonucleotide"
aacatgagagtcacaccacaa

SEQ ID NO: 35537 - DNA, 21 bp, Artificial Sequence
  source: /note="Description of Artificial Sequence: Synthetic oligonucleotide"
aacatgagcgcaaacatcaac

SEQ ID NO: 35538 - DNA, 21 bp, Artificial Sequence
  source: /note="Description of Artificial Sequence: Synthetic oligonucleotide"
aacatgagcaaaagcccagga

SEQ ID NO: 35539 - DNA, 21 bp, Artificial Sequence
  source: /note="Description of Artificial Sequence: Synthetic oligonucleotide"
aacatgagcaacgtccacaca

SEQ ID NO: 35540 - DNA, 21 bp, Artificial Sequence
  source: /note="Description of Artificial Sequence: Synthetic oligonucleotide"
aacatgagcagaggagcaatg

SEQ ID NO: 35541 - DNA, 21 bp, Artificial Sequence
  source: /note="Description of Artificial Sequence: Synthetic oligonucleotide"
aacatgtacccagtcccacca

SEQ ID NO: 35542 - DNA, 21 bp, Artificial Sequence
  source: /note="Description of Artificial Sequence: Synthetic oligonucleotide"
aacaacgcaaaagcaatgaca

SEQ ID NO: 35543 - DNA, 21 bp, Artificial Sequence
  source: /note="Description of Artificial Sequence: Synthetic oligonucleotide"
aacaacgcaagcagcagcgac

SEQ ID NO: 35544 - DNA, 21 bp, Artificial Sequence
  source: /note="Description of Artificial Sequence: Synthetic oligonucleotide"
aacaacgacagactcgtccac

SEQ ID NO: 35545 - DNA, 21 bp, Artificial Sequence
  source: /note="Description of Artificial Sequence: Synthetic oligonucleotide"
aacaacgaactcagaagcagc

SEQ ID NO: 35546 - DNA, 21 bp, Artificial Sequence
  source: /note="Description of Artificial Sequence: Synthetic oligonucleotide"
aacaacttcggaaacacatac

SEQ ID NO: 35547 - DNA, 21 bp, Artificial Sequence
  source: /note="Description of Artificial Sequence: Synthetic oligonucleotide"
aacaacggaaaaggaccagtc

SEQ ID NO: 35548 - DNA, 21 bp, Artificial Sequence
  source: /note="Description of Artificial Sequence: Synthetic oligonucleotide"
aacaacggactcccaagcaga

SEQ ID NO: 35549 - DNA, 21 bp, Artificial Sequence
  source: /note="Description of Artificial Sequence: Synthetic oligonucleotide"
aacaacggaagagcacaactc

SEQ ID NO: 35550 - DNA, 21 bp, Artificial Sequence
  source: /note="Description of Artificial Sequence: Synthetic oligonucleotide"
aacaacggaagactcccaaac

SEQ ID NO: 35551 - DNA, 21 bp, Artificial Sequence
  source: /note="Description of Artificial Sequence: Synthetic oligonucleotide"
aacaaccacaaaatccaaagc

SEQ ID NO: 35552 - DNA, 21 bp, Artificial Sequence
  source: /note="Description of Artificial Sequence: Synthetic oligonucleotide"
aacaacctcagactcaacctc

SEQ ID NO: 35553 - DNA, 21 bp, Artificial Sequence
  source: /note="Description of Artificial Sequence: Synthetic oligonucleotide"
aacaacctcagaacaagcctc

SEQ ID NO: 35554 - DNA, 21 bp, Artificial Sequence
  source: /note="Description of Artificial Sequence: Synthetic oligonucleotide"
aacaacatgaacacaatgcca

SEQ ID NO: 35555 - DNA, 21 bp, Artificial Sequence
  source: /note="Description of Artificial Sequence: Synthetic oligonucleotide"
aacaacaacgaacactacgtc

SEQ ID NO: 35556 - DNA, 21 bp, Artificial Sequence
  source: /note="Description of Artificial Sequence: Synthetic oligonucleotide"
aacaacaacctcgaaacaatg

SEQ ID NO: 35557 - DNA, 21 bp, Artificial Sequence
  source: /note="Description of Artificial Sequence: Synthetic oligonucleotide"
aacaacaacccaaaatacgga

SEQ ID NO: 35558 - DNA, 21 bp, Artificial Sequence
  source: /note="Description of Artificial Sequence: Synthetic oligonucleotide"
aacaacaacacaacaccactc

SEQ ID NO: 35559 - DNA, 21 bp, Artificial Sequence
  source: /note="Description of Artificial Sequence: Synthetic oligonucleotide"
aacaacccagcaccaccaagc

SEQ ID NO: 35560 - DNA, 21 bp, Artificial Sequence
  source: /note="Description of Artificial Sequence: Synthetic oligonucleotide"
aacaacccagacgcatacagc

SEQ ID NO: 35561 - DNA, 21 bp, Artificial Sequence
  source: /note="Description of Artificial Sequence: Synthetic oligonucleotide"
aacaacagaccagcaagagaa

SEQ ID NO: 35562 - DNA, 21 bp, Artificial Sequence
  source: /note="Description of Artificial Sequence: Synthetic oligonucleotide"
aacaacagcatggcactcatg

SEQ ID NO: 35563 - DNA, 21 bp, Artificial Sequence
  source: /note="Description of Artificial Sequence: Synthetic oligonucleotide"
aacaacagcagaatcagcagc

SEQ ID NO: 35564 - DNA, 21 bp, Artificial Sequence
  source: /note="Description of Artificial Sequence: Synthetic oligonucleotide"
aacaacagcagagtcggaaca

SEQ ID NO: 35565 - DNA, 21 bp, Artificial Sequence
  source: /note="Description of Artificial Sequence: Synthetic oligonucleotide"
aacaacagcagctacagcgaa

SEQ ID NO: 35566 - DNA, 21 bp, Artificial Sequence
  source: /note="Description of Artificial Sequence: Synthetic oligonucleotide"
aacaacgtcaacccaatcgca

SEQ ID NO: 35567 - DNA, 21 bp, Artificial Sequence
  source: /note="Description of Artificial Sequence: Synthetic oligonucleotide"
aacaacgtcagcacaatcatc

SEQ ID NO: 35568 - DNA, 21 bp, Artificial Sequence
  source: /note="Description of Artificial Sequence: Synthetic oligonucleotide"
aacaactggcacaacacacca

SEQ ID NO: 35569 - DNA, 21 bp, Artificial Sequence
  source: /note="Description of Artificial Sequence: Synthetic oligonucleotide"
aacaactacaacccaccaaca

SEQ ID NO: 35570 - DNA, 21 bp, Artificial Sequence
  source: /note="Description of Artificial Sequence: Synthetic oligonucleotide"
aacccagcagcaagcacacac

SEQ ID NO: 35571 - DNA, 21 bp, Artificial Sequence
  source: /note="Description of Artificial Sequence: Synthetic oligonucleotide"
aacccagcactcccaggacac

SEQ ID NO: 35572 - DNA, 21 bp, Artificial Sequence
  source: /note="Description of Artificial Sequence: Synthetic oligonucleotide"
aacccagaaggatggggactc

SEQ ID NO: 35573 - DNA, 21 bp, Artificial Sequence
  source: /note="Description of Artificial Sequence: Synthetic oligonucleotide"
aacccagaaacactcatcaga

SEQ ID NO: 35574 - DNA, 21 bp, Artificial Sequence
  source: /note="Description of Artificial Sequence: Synthetic oligonucleotide"
aacccagaagtcagcccaagc

SEQ ID NO: 35575 - DNA, 21 bp, Artificial Sequence
  source: /note="Description of Artificial Sequence: Synthetic oligonucleotide"
aacccaggagcaaacatgagc

SEQ ID NO: 35576 - DNA, 21 bp, Artificial Sequence
  source: /note="Description of Artificial Sequence: Synthetic oligonucleotide"
aacccaggaagccaaatggtc

SEQ ID NO: 35577 - DNA, 21 bp, Artificial Sequence
  source: /note="Description of Artificial Sequence: Synthetic oligonucleotide"
aacccaggaacaacaacaaca

SEQ ID NO: 35578 - DNA, 21 bp, Artificial Sequence
  source: /note="Description of Artificial Sequence: Synthetic oligonucleotide"
aacccaggagtcaaaagcgca

SEQ ID NO: 35579 - DNA, 21 bp, Artificial Sequence
  source: /note="Description of Artificial Sequence: Synthetic oligonucleotide"
aacccaggagtcacacacctc

SEQ ID NO: 35580 - DNA, 21 bp, Artificial Sequence
  source: /note="Description of Artificial Sequence: Synthetic oligonucleotide"
aacccacacatcagcgtcagc

SEQ ID NO: 35581 - DNA, 21 bp, Artificial Sequence
  source: /note="Description of Artificial Sequence: Synthetic oligonucleotide"
aacccacacatgcaaaacatc

SEQ ID NO: 35582 - DNA, 21 bp, Artificial Sequence
  source: /note="Description of Artificial Sequence: Synthetic oligonucleotide"
aacccacacaacgacacagga

SEQ ID NO: 35583 - DNA, 21 bp, Artificial Sequence
  source: /note="Description of Artificial Sequence: Synthetic oligonucleotide"
aacccaatcctcaaaacacaa

SEQ ID NO: 35584 - DNA, 21 bp, Artificial Sequence
  source: /note="Description of Artificial Sequence: Synthetic oligonucleotide"
aacccaatcagcagcggacca

SEQ ID NO: 35585 - DNA, 21 bp, Artificial Sequence
  source: /note="Description of Artificial Sequence: Synthetic oligonucleotide"
aacccaaaactcatgaaagaa

SEQ ID NO: 35586 - DNA, 21 bp, Artificial Sequence
  source: /note="Description of Artificial Sequence: Synthetic oligonucleotide"
aacccactcagcaacgacgga

SEQ ID NO: 35587 - DNA, 21 bp, Artificial Sequence
  source: /note="Description of Artificial Sequence: Synthetic oligonucleotide"
aacccactcacaacacacgac

SEQ ID NO: 35588 - DNA, 21 bp, Artificial Sequence
  source: /note="Description of Artificial Sequence: Synthetic oligonucleotide"
aacccaatgatgcacggaagc

SEQ ID NO: 35589 - DNA, 21 bp, Artificial Sequence
  source: /note="Description of Artificial Sequence: Synthetic oligonucleotide"
aacccaatgacaccagaccca

SEQ ID NO: 35590 - DNA, 21 bp, Artificial Sequence
  source: /note="Description of Artificial Sequence: Synthetic oligonucleotide"
aacccaaaccaagtcgcagaa

SEQ ID NO: 35591 - DNA, 21 bp, Artificial Sequence
  source: /note="Description of Artificial Sequence: Synthetic oligonucleotide"
aacccaaacacaagaaactgc

SEQ ID NO: 35592 - DNA, 21 bp, Artificial Sequence
  source: /note="Description of Artificial Sequence: Synthetic oligonucleotide"
aacccaccagcactcctccca

SEQ ID NO: 35593 - DNA, 21 bp, Artificial Sequence
  source: /note="Description of Artificial Sequence: Synthetic oligonucleotide"
aacccaccaccaccaagccca

SEQ ID NO: 35594 - DNA, 21 bp, Artificial Sequence
  source: /note="Description of Artificial Sequence: Synthetic oligonucleotide"
aacccaccaagatacggaagc

SEQ ID NO: 35595 - DNA, 21 bp, Artificial Sequence
  source: /note="Description of Artificial Sequence: Synthetic oligonucleotide"
aacccaccaagcctcagcagc

SEQ ID NO: 35596 - DNA, 21 bp, Artificial Sequence
  source: /note="Description of Artificial Sequence: Synthetic oligonucleotide"
aacccaccaagcagaggaaac

SEQ ID NO: 35597 - DNA, 21 bp, Artificial Sequence
  source: /note="Description of Artificial Sequence: Synthetic oligonucleotide"
aacccaccatacgcactcgca

SEQ ID NO: 35598 - DNA, 21 bp, Artificial Sequence
  source: /note="Description of Artificial Sequence: Synthetic oligonucleotide"
aacccacaaatgccaagccca

SEQ ID NO: 35599 - DNA, 21 bp, Artificial Sequence
  source: /note="Description of Artificial Sequence: Synthetic oligonucleotide"
aacccacaaagactcggacaa

SEQ ID NO: 35600 - DNA, 21 bp, Artificial Sequence
  source: /note="Description of Artificial Sequence: Synthetic oligonucleotide"
aacccacaaagcgtcacacac

SEQ ID NO: 35601 - DNA, 21 bp, Artificial Sequence
  source: /note="Description of Artificial Sequence: Synthetic oligonucleotide"
aacccaagagcacaaatgagc

SEQ ID NO: 35602 - DNA, 21 bp, Artificial Sequence
  source: /note="Description of Artificial Sequence: Synthetic oligonucleotide"
aacccaagagcaagcagctgg

SEQ ID NO: 35603 - DNA, 21 bp, Artificial Sequence
  source: /note="Description of Artificial Sequence: Synthetic oligonucleotide"
aacccaagaaacccaacactc

SEQ ID NO: 35604 - DNA, 21 bp, Artificial Sequence
  source: /note="Description of Artificial Sequence: Synthetic oligonucleotide"
aacccaagaccaggacaagtc

SEQ ID NO: 35605 - DNA, 21 bp, Artificial Sequence
  source: /note="Description of Artificial Sequence: Synthetic oligonucleotide"
aacccaagcggaaaagtcgca

SEQ ID NO: 35606 - DNA, 21 bp, Artificial Sequence
  source: /note="Description of Artificial Sequence: Synthetic oligonucleotide"
aacccaagcctccaaacaaca

SEQ ID NO: 35607 - DNA, 21 bp, Artificial Sequence
  source: /note="Description of Artificial Sequence: Synthetic oligonucleotide"
aacccaagcctcagaatcgga

SEQ ID NO: 35608 - DNA, 21 bp, Artificial Sequence
  source: /note="Description of Artificial Sequence: Synthetic oligonucleotide"
aacccaagcaaccacgcactc

SEQ ID NO: 35609 - DNA, 21 bp, Artificial Sequence
  source: /note="Description of Artificial Sequence: Synthetic oligonucleotide"
aacccaagccaattcgacttc

SEQ ID NO: 35610 - DNA, 21 bp, Artificial Sequence
  source: /note="Description of Artificial Sequence: Synthetic oligonucleotide"
aacccaagcagactcccacaa

SEQ ID NO: 35611 - DNA, 21 bp, Artificial Sequence
  source: /note="Description of Artificial Sequence: Synthetic oligonucleotide"
aacccaagcagacaagcacca

SEQ ID NO: 35612 - DNA, 21 bp, Artificial Sequence
  source: /note="Description of Artificial Sequence: Synthetic oligonucleotide"
aacccaagcagcagcggatgc

SEQ ID NO: 35613 - DNA, 21 bp, Artificial Sequence
  source: /note="Description of Artificial Sequence: Synthetic oligonucleotide"
aacccaagcgtcgtcacagca

SEQ ID NO: 35614 - DNA, 21 bp, Artificial Sequence
  source: /note="Description of Artificial Sequence: Synthetic oligonucleotide"
aacccaacagcaagcaacgca

SEQ ID NO: 35615 - DNA, 21 bp, Artificial Sequence
  source: /note="Description of Artificial Sequence: Synthetic oligonucleotide"
aacccaacattccacggaagc

SEQ ID NO: 35616 - DNA, 21 bp, Artificial Sequence
  source: /note="Description of Artificial Sequence: Synthetic oligonucleotide"
aacccaacacaaccaatcaaa

SEQ ID NO: 35617 - DNA, 21 bp, Artificial Sequence
  source: /note="Description of Artificial Sequence: Synthetic oligonucleotide"
aacccaacaagcctcccaagc

SEQ ID NO: 35618 - DNA, 21 bp, Artificial Sequence
  source: /note="Description of Artificial Sequence: Synthetic oligonucleotide"
aacccaacaacaagatacatg

SEQ ID NO: 35619 - DNA, 21 bp, Artificial Sequence
  source: /note="Description of Artificial Sequence: Synthetic oligonucleotide"
aacccaacagtcacaggaagc

SEQ ID NO: 35620 - DNA, 21 bp, Artificial Sequence
  source: /note="Description of Artificial Sequence: Synthetic oligonucleotide"
aacccatacaacacagaagca

SEQ ID NO: 35621 - DNA, 21 bp, Artificial Sequence
  source: /note="Description of Artificial Sequence: Synthetic oligonucleotide"
aacccatacgtcctcagagca

SEQ ID NO: 35622 - DNA, 21 bp, Artificial Sequence
  source: /note="Description of Artificial Sequence: Synthetic oligonucleotide"
aaccaagacaaagcaacacac

SEQ ID NO: 35623 - DNA, 21 bp, Artificial Sequence
  source: /note="Description of Artificial Sequence: Synthetic oligonucleotide"
aaccaagacccatacatgtac

SEQ ID NO: 35624 - DNA, 21 bp, Artificial Sequence
  source: /note="Description of Artificial Sequence: Synthetic oligonucleotide"
aaccaagaaggaagcccaatc

SEQ ID NO: 35625 - DNA, 21 bp, Artificial Sequence
  source: /note="Description of Artificial Sequence: Synthetic oligonucleotide"
aaccaagaaaacaaaatcgga

SEQ ID NO: 35626 - DNA, 21 bp, Artificial Sequence
  source: /note="Description of Artificial Sequence: Synthetic oligonucleotide"
aaccaaggacaaaacccagtc

SEQ ID NO: 35627 - DNA, 21 bp, Artificial Sequence
  source: /note="Description of Artificial Sequence: Synthetic oligonucleotide"
aaccaaatcgcagtcagcaga

SEQ ID NO: 35628 - DNA, 21 bp, Artificial Sequence
  source: /note="Description of Artificial Sequence: Synthetic oligonucleotide"
aaccaactccacccagtcaga

SEQ ID NO: 35629 - DNA, 21 bp, Artificial Sequence
  source: /note="Description of Artificial Sequence: Synthetic oligonucleotide"
aaccaactcgtcgcacacgca

SEQ ID NO: 35630 - DNA, 21 bp, Artificial Sequence
  source: /note="Description of Artificial Sequence: Synthetic oligonucleotide"
aaccaaaactaccaaatcgtc

SEQ ID NO: 35631 - DNA, 21 bp, Artificial Sequence
  source: /note="Description of Artificial Sequence: Synthetic oligonucleotide"
aaccaacaaggaagcatggca

SEQ ID NO: 35632 - DNA, 21 bp, Artificial Sequence
  source: /note="Description of Artificial Sequence: Synthetic oligonucleotide"
aaccaaagagacacaatgaca

SEQ ID NO: 35633 - DNA, 21 bp, Artificial Sequence
  source: /note="Description of Artificial Sequence: Synthetic oligonucleotide"
aaccaaagaccagtcaacttc

SEQ ID NO: 35634 - DNA, 21 bp, Artificial Sequence
  source: /note="Description of Artificial Sequence: Synthetic oligonucleotide"
aaccaaagaagcacaagcatg

SEQ ID NO: 35635 - DNA, 21 bp, Artificial Sequence
  source: /note="Description of Artificial Sequence: Synthetic oligonucleotide"
aaccaaagcatccaccaaaca

SEQ ID NO: 35636 - DNA, 21 bp, Artificial Sequence
  source: /note="Description of Artificial Sequence: Synthetic oligonucleotide"
aaccaaacagcatgcgaagtc

SEQ ID NO: 35637 - DNA, 21 bp, Artificial Sequence
  source: /note="Description of Artificial Sequence: Synthetic oligonucleotide"
aaccaaacactcatggcaagc

SEQ ID NO: 35638 - DNA, 21 bp, Artificial Sequence
  source: /note="Description of Artificial Sequence: Synthetic oligonucleotide"
aaccaaacaaacggaagagca

SEQ ID NO: 35639 - DNA, 21 bp, Artificial Sequence
  source: /note="Description of Artificial Sequence: Synthetic oligonucleotide"
aaccaaacaagagtcgtccca

SEQ ID NO: 35640 - DNA, 21 bp, Artificial Sequence
  source: /note="Description of Artificial Sequence: Synthetic oligonucleotide"
aaccaatacccaagagaccca

SEQ ID NO: 35641 - DNA, 21 bp, Artificial Sequence
  source: /note="Description of Artificial Sequence: Synthetic oligonucleotide"
aacagagcagaaagcctcctc

SEQ ID NO: 35642 - DNA, 21 bp, Artificial Sequence
  source: /note="Description of Artificial Sequence: Synthetic oligonucleotide"
aacagagcaccaccactcagc

SEQ ID NO: 35643 - DNA, 21 bp, Artificial Sequence
  source: /note="Description of Artificial Sequence: Synthetic oligonucleotide"
aacagagacatcgcaggaaga

SEQ ID NO: 35644 - DNA, 21 bp, Artificial Sequence
  source: /note="Description of Artificial Sequence: Synthetic oligonucleotide"
aacagagacatcctcagcagc

SEQ ID NO: 35645 - DNA, 21 bp, Artificial Sequence
  source: /note="Description of Artificial Sequence: Synthetic oligonucleotide"
aacagagacgtcccagaaagc

SEQ ID NO: 35646 - DNA, 21 bp, Artificial Sequence
  source: /note="Description of Artificial Sequence: Synthetic oligonucleotide"
aacagagactacagcacagca

SEQ ID NO: 35647 - DNA, 21 bp, Artificial Sequence
  source: /note="Description of Artificial Sequence: Synthetic oligonucleotide"
aacagagactacagcgtcgac

SEQ ID NO: 35648 - DNA, 21 bp, Artificial Sequence
  source: /note="Description of Artificial Sequence: Synthetic oligonucleotide"
aacagagactacacaagccca

SEQ ID NO: 35649 - DNA, 21 bp, Artificial Sequence
  source: /note="Description of Artificial Sequence: Synthetic oligonucleotide"
aacagagaaccaggactcaac

SEQ ID NO: 35650 - DNA, 21 bp, Artificial Sequence
  source: /note="Description of Artificial Sequence: Synthetic oligonucleotide"
aacagagaaagagcaatgaca

SEQ ID NO: 35651 - DNA, 21 bp, Artificial Sequence
  source: /note="Description of Artificial Sequence: Synthetic oligonucleotide"
aacagagaaagctacagcctc

SEQ ID NO: 35652 - DNA, 21 bp, Artificial Sequence
  source: /note="Description of Artificial Sequence: Synthetic oligonucleotide"
aacagattcccacacgtcgac

SEQ ID NO: 35653 - DNA, 21 bp, Artificial Sequence
  source: /note="Description of Artificial Sequence: Synthetic oligonucleotide"
aacagaggacacctcgacagc

SEQ ID NO: 35654 - DNA, 21 bp, Artificial Sequence
  source: /note="Description of Artificial Sequence: Synthetic oligonucleotide"
aacagaggactcgtcgcagca

SEQ ID NO: 35655 - DNA, 21 bp, Artificial Sequence
  source: /note="Description of Artificial Sequence: Synthetic oligonucleotide"
aacagaggaaacttcgacaga

SEQ ID NO: 35656 - DNA, 21 bp, Artificial Sequence
  source: /note="Description of Artificial Sequence: Synthetic oligonucleotide"
aacagaggaccaagcaacaca

SEQ ID NO: 35657 - DNA, 21 bp, Artificial Sequence
  source: /note="Description of Artificial Sequence: Synthetic oligonucleotide"
aacagaggacaaacagcacaa

SEQ ID NO: 35658 - DNA, 21 bp, Artificial Sequence
  source: /note="Description of Artificial Sequence: Synthetic oligonucleotide"
aacagaggaacactcctcagc

SEQ ID NO: 35659 - DNA, 21 bp, Artificial Sequence
  source: /note="Description of Artificial Sequence: Synthetic oligonucleotide"
aacagaatcgcagcagaagca

SEQ ID NO: 35660 - DNA, 21 bp, Artificial Sequence
  source: /note="Description of Artificial Sequence: Synthetic oligonucleotide"
aacagaatcatgccaatcagc

SEQ ID NO: 35661 - DNA, 21 bp, Artificial Sequence
  source: /note="Description of Artificial Sequence: Synthetic oligonucleotide"
aacagaatcagcgcacaacac

SEQ ID NO: 35662 - DNA, 21 bp, Artificial Sequence
  source: /note="Description of Artificial Sequence: Synthetic oligonucleotide"
aacagaatcagcagcttccca

SEQ ID NO: 35663 - DNA, 21 bp, Artificial Sequence
  source: /note="Description of Artificial Sequence: Synthetic oligonucleotide"
aacagaaaagcactcagcgaa

SEQ ID NO: 35664 - DNA, 21 bp, Artificial Sequence
  source: /note="Description of Artificial Sequence: Synthetic oligonucleotide"
aacagaaaaccaacaatggac

SEQ ID NO: 35665 - DNA, 21 bp, Artificial Sequence
  source: /note="Description of Artificial Sequence: Synthetic oligonucleotide"
aacagactcctcggatacgga

SEQ ID NO: 35666 - DNA, 21 bp, Artificial Sequence
  source: /note="Description of Artificial Sequence: Synthetic oligonucleotide"
aacagaatgccaagcgcagca

SEQ ID NO: 35667 - DNA, 21 bp, Artificial Sequence
  source: /note="Description of Artificial Sequence: Synthetic oligonucleotide"
aacagaatgagcggaagcgac

SEQ ID NO: 35668 - DNA, 21 bp, Artificial Sequence
  source: /note="Description of Artificial Sequence: Synthetic oligonucleotide"
aacagaaacctcgacaacgga

SEQ ID NO: 35669 - DNA, 21 bp, Artificial Sequence
  source: /note="Description of Artificial Sequence: Synthetic oligonucleotide"
aacagaccaatggaactcctc

SEQ ID NO: 35670 - DNA, 21 bp, Artificial Sequence
  source: /note="Description of Artificial Sequence: Synthetic oligonucleotide"
aacagaccacaacacgcagtc

SEQ ID NO: 35671 - DNA, 21 bp, Artificial Sequence
  source: /note="Description of Artificial Sequence: Synthetic oligonucleotide"
aacagacaagacgtcccaagc

SEQ ID NO: 35672 - DNA, 21 bp, Artificial Sequence
  source: /note="Description of Artificial Sequence: Synthetic oligonucleotide"
aacagacaaggaaacgaactc

SEQ ID NO: 35673 - DNA, 21 bp, Artificial Sequence
  source: /note="Description of Artificial Sequence: Synthetic oligonucleotide"
aacagacaaccactcatgaca

SEQ ID NO: 35674 - DNA, 21 bp, Artificial Sequence
  source: /note="Description of Artificial Sequence: Synthetic oligonucleotide"
aacagacaaccaccaagagaa

SEQ ID NO: 35675 - DNA, 21 bp, Artificial Sequence
  source: /note="Description of Artificial Sequence: Synthetic oligonucleotide"
aacagacaaagcctcccactc

SEQ ID NO: 35676 - DNA, 21 bp, Artificial Sequence
  source: /note="Description of Artificial Sequence: Synthetic oligonucleotide"
aacagacaaacaatcgcactc

SEQ ID NO: 35677 - DNA, 21 bp, Artificial Sequence
  source: /note="Description of Artificial Sequence: Synthetic oligonucleotide"
aacagaagaacaaacgaagac

SEQ ID NO: 35678 - DNA, 21 bp, Artificial Sequence
  source: /note="Description of Artificial Sequence: Synthetic oligonucleotide"
aacagaagcgcagaatgctgg

SEQ ID NO: 35679 - DNA, 21 bp, Artificial Sequence
  source: /note="Description of Artificial Sequence: Synthetic oligonucleotide"
aacagaagcgcactcacacca

SEQ ID NO: 35680 - DNA, 21 bp, Artificial Sequence
  source: /note="Description of Artificial Sequence: Synthetic oligonucleotide"
aacagaagcgcaagagaccca

SEQ ID NO: 35681 - DNA, 21 bp, Artificial Sequence
  source: /note="Description of Artificial Sequence: Synthetic oligonucleotide"
aacagaagcgaaatggtcgaa

SEQ ID NO: 35682 - DNA, 21 bp, Artificial Sequence
  source: /note="Description of Artificial Sequence: Synthetic oligonucleotide"
aacagaagcggactcgtcagc

SEQ ID NO: 35683 - DNA, 21 bp, Artificial Sequence
  source: /note="Description of Artificial Sequence: Synthetic oligonucleotide"
aacagaagcatcacacacgac

SEQ ID NO: 35684 - DNA, 21 bp, Artificial Sequence
  source: /note="Description of Artificial Sequence: Synthetic oligonucleotide"
aacagaagcctcgcaacagtc

SEQ ID NO: 35685 - DNA, 21 bp, Artificial Sequence
  source: /note="Description of Artificial Sequence: Synthetic oligonucleotide"
aacagaagcgtcctcagcgac

SEQ ID NO: 35686 - DNA, 21 bp, Artificial Sequence
  source: /note="Description of Artificial Sequence: Synthetic oligonucleotide"
aacagaagctacgacagccca

SEQ ID NO: 35687 - DNA, 21 bp, Artificial Sequence
  source: /note="Description of Artificial Sequence: Synthetic oligonucleotide"
aacagaacactcgacatgagc

SEQ ID NO: 35688 - DNA, 21 bp, Artificial Sequence
  source: /note="Description of Artificial Sequence: Synthetic oligonucleotide"
aacagaacactcccaacaagc

SEQ ID NO: 35689 - DNA, 21 bp, Artificial Sequence
  source: /note="Description of Artificial Sequence: Synthetic oligonucleotide"
aacagaacactctacccagca

SEQ ID NO: 35690 - DNA, 21 bp, Artificial Sequence
  source: /note="Description of Artificial Sequence: Synthetic oligonucleotide"
aacagaacacaacaaagcagc

SEQ ID NO: 35691 - DNA, 21 bp, Artificial Sequence
  source: /note="Description of Artificial Sequence: Synthetic oligonucleotide"
aacagaacacaaagcatcagc

SEQ ID NO: 35692 - DNA, 21 bp, Artificial Sequence
  source: /note="Description of Artificial Sequence: Synthetic oligonucleotide"
aacagaacaacactcatgagc

SEQ ID NO: 35693 - DNA, 21 bp, Artificial Sequence
  source: /note="Description of Artificial Sequence: Synthetic oligonucleotide"
aacagagtcggagaaacaaga

SEQ ID NO: 35694 - DNA, 21 bp, Artificial Sequence
  source: /note="Description of Artificial Sequence: Synthetic oligonucleotide"
aacagagtcggaatcgcacca

SEQ ID NO: 35695 - DNA, 21 bp, Artificial Sequence
  source: /note="Description of Artificial Sequence: Synthetic oligonucleotide"
aacagagtcgtcttcgaagga

SEQ ID NO: 35696 - DNA, 21 bp, Artificial Sequence
  source: /note="Description of Artificial Sequence: Synthetic oligonucleotide"
aacagatacgacgcaagcgac

SEQ ID NO: 35697 - DNA, 21 bp, Artificial Sequence
  source: /note="Description of Artificial Sequence: Synthetic oligonucleotide"
aacagcgcagcaagaatccac

SEQ ID NO: 35698 - DNA, 21 bp, Artificial Sequence
  source: /note="Description of Artificial Sequence: Synthetic oligonucleotide"
aacagcgcagacagcagccca

SEQ ID NO: 35699 - DNA, 21 bp, Artificial Sequence
  source: /note="Description of Artificial Sequence: Synthetic oligonucleotide"
aacagcgcaatgcacggaaca

SEQ ID NO: 35700 - DNA, 21 bp, Artificial Sequence
  source: /note="Description of Artificial Sequence: Synthetic oligonucleotide"
aacagcgcaagcgaattcgtc

SEQ ID NO: 35701 - DNA, 21 bp, Artificial Sequence
  source: /note="Description of Artificial Sequence: Synthetic oligonucleotide"
aacagcgcaagcgaaatgaca

SEQ ID NO: 35702 - DNA, 21 bp, Artificial Sequence
  source: /note="Description of Artificial Sequence: Synthetic oligonucleotide"
aacagcgcaagcacattccaa

SEQ ID NO: 35703 - DNA, 21 bp, Artificial Sequence
  source: /note="Description of Artificial Sequence: Synthetic oligonucleotide"
aacagcgcaagcacattcaca

SEQ ID NO: 35704 - DNA, 21 bp, Artificial Sequence
  source: /note="Description of Artificial Sequence: Synthetic oligonucleotide"
aacagcgcagtcatgacaaga

SEQ ID NO: 35705 - DNA, 21 bp, Artificial Sequence
  source: /note="Description of Artificial Sequence: Synthetic oligonucleotide"
aacagcgcatacccagtccac

SEQ ID NO: 35706 - DNA, 21 bp, Artificial Sequence
  source: /note="Description of Artificial Sequence: Synthetic oligonucleotide"
aacagcgacttcagcctcgca

SEQ ID NO: 35707 - DNA, 21 bp, Artificial Sequence
  source: /note="Description of Artificial Sequence: Synthetic oligonucleotide"
aacagcgacctccacaaacca

SEQ ID NO: 35708 - DNA, 21 bp, Artificial Sequence
  source: /note="Description of Artificial Sequence: Synthetic oligonucleotide"
aacagcgacagcagaacacca

SEQ ID NO: 35709 - DNA, 21 bp, Artificial Sequence
  source: /note="Description of Artificial Sequence: Synthetic oligonucleotide"
aacagcgacagcagcatcaga

SEQ ID NO: 35710 - DNA, 21 bp, Artificial Sequence
  source: /note="Description of Artificial Sequence: Synthetic oligonucleotide"
aacagcggactcgaactcctc

SEQ ID NO: 35711 - DNA, 21 bp, Artificial Sequence
  source: /note="Description of Artificial Sequence: Synthetic oligonucleotide"
aacagcggaaacagcacacca

SEQ ID NO: 35712 - DNA, 21 bp, Artificial Sequence
  source: /note="Description of Artificial Sequence: Synthetic oligonucleotide"
aacagcggaagagcacacatc

SEQ ID NO: 35713 - DNA, 21 bp, Artificial Sequence
  source: /note="Description of Artificial Sequence: Synthetic oligonucleotide"
aacagccacgcacaccacgac

SEQ ID NO: 35714 - DNA, 21 bp, Artificial Sequence
  source: /note="Description of Artificial Sequence: Synthetic oligonucleotide"
aacagccacaacctcacactc

SEQ ID NO: 35715 - DNA, 21 bp, Artificial Sequence
  source: /note="Description of Artificial Sequence: Synthetic oligonucleotide"
aacagccacccacaaacaaga

SEQ ID NO: 35716 - DNA, 21 bp, Artificial Sequence
  source: /note="Description of Artificial Sequence: Synthetic oligonucleotide"
aacagccacagcagcccagca

SEQ ID NO: 35717 - DNA, 21 bp, Artificial Sequence
  source: /note="Description of Artificial Sequence: Synthetic oligonucleotide"
aacagccacagcgtcagcaca

SEQ ID NO: 35718 - DNA, 21 bp, Artificial Sequence
  source: /note="Description of Artificial Sequence: Synthetic oligonucleotide"
aacagcatcccagaaagattc

SEQ ID NO: 35719 - DNA, 21 bp, Artificial Sequence
  source: /note="Description of Artificial Sequence: Synthetic oligonucleotide"
aacagcatcagactcagcgga

SEQ ID NO: 35720 - DNA, 21 bp, Artificial Sequence
  source: /note="Description of Artificial Sequence: Synthetic oligonucleotide"
aacagcaaaatgccaagagca

SEQ ID NO: 35721 - DNA, 21 bp, Artificial Sequence
  source: /note="Description of Artificial Sequence: Synthetic oligonucleotide"
aacagcaaatacacaccaatg

SEQ ID NO: 35722 - DNA, 21 bp, Artificial Sequence
  source: /note="Description of Artificial Sequence: Synthetic oligonucleotide"
aacagcctcgcagcaagaaac

SEQ ID NO: 35723 - DNA, 21 bp, Artificial Sequence
  source: /note="Description of Artificial Sequence: Synthetic oligonucleotide"
aacagcctcgcaagaaaagaa

SEQ ID NO: 35724 - DNA, 21 bp, Artificial Sequence
  source: /note="Description of Artificial Sequence: Synthetic oligonucleotide"
aacagcctcaacgacagagca

SEQ ID NO: 35725 - DNA, 21 bp, Artificial Sequence
  source: /note="Description of Artificial Sequence: Synthetic oligonucleotide"
aacagcctcaacccaggactc

SEQ ID NO: 35726 - DNA, 21 bp, Artificial Sequence
  source: /note="Description of Artificial Sequence: Synthetic oligonucleotide"
aacagcctcccagacagcgtc

SEQ ID NO: 35727 - DNA, 21 bp, Artificial Sequence
  source: /note="Description of Artificial Sequence: Synthetic oligonucleotide"
aacagcctcccaatggcaagc

SEQ ID NO: 35728 - DNA, 21 bp, Artificial Sequence
  source: /note="Description of Artificial Sequence: Synthetic oligonucleotide"
aacagcatgcaatacagcgca

SEQ ID NO: 35729 - DNA, 21 bp, Artificial Sequence
  source: /note="Description of Artificial Sequence: Synthetic oligonucleotide"
aacagcaacgcagcaagcgga

SEQ ID NO: 35730 - DNA, 21 bp, Artificial Sequence
  source: /note="Description of Artificial Sequence: Synthetic oligonucleotide"
aacagcaaccacgaaagatac

SEQ ID NO: 35731 - DNA, 21 bp, Artificial Sequence
  source: /note="Description of Artificial Sequence: Synthetic oligonucleotide"
aacagcaacacaccaggaatg

SEQ ID NO: 35732 - DNA, 21 bp, Artificial Sequence
  source: /note="Description of Artificial Sequence: Synthetic oligonucleotide"
aacagcaacgtcagcccagga

SEQ ID NO: 35733 - DNA, 21 bp, Artificial Sequence
  source: /note="Description of Artificial Sequence: Synthetic oligonucleotide"
aacagcccaatcttcgtcgga

SEQ ID NO: 35734 - DNA, 21 bp, Artificial Sequence
  source: /note="Description of Artificial Sequence: Synthetic oligonucleotide"
aacagcccaaacgaaagaaca

SEQ ID NO: 35735 - DNA, 21 bp, Artificial Sequence
  source: /note="Description of Artificial Sequence: Synthetic oligonucleotide"
aacagcccaaaccaactcgga

SEQ ID NO: 35736 - DNA, 21 bp, Artificial Sequence
  source: /note="Description of Artificial Sequence: Synthetic oligonucleotide"
aacagcccaagacacgtcgca

SEQ ID NO: 35737 - DNA, 21 bp, Artificial Sequence
  source: /note="Description of Artificial Sequence: Synthetic oligonucleotide"
aacagcccaagccacagccca

SEQ ID NO: 35738 - DNA, 21 bp, Artificial Sequence
  source: /note="Description of Artificial Sequence: Synthetic oligonucleotide"
aacagcccaacagtccaactc

SEQ ID NO: 35739 - DNA, 21 bp, Artificial Sequence
  source: /note="Description of Artificial Sequence: Synthetic oligonucleotide"
aacagcccagtcgtcagcaga

SEQ ID NO: 35740 - DNA, 21 bp, Artificial Sequence
  source: /note="Description of Artificial Sequence: Synthetic oligonucleotide"
aacagccaacacagcacaaca

SEQ ID NO: 35741 - DNA, 21 bp, Artificial Sequence
  source: /note="Description of Artificial Sequence: Synthetic oligonucleotide"
aacagccaactccaaagcagc

SEQ ID NO: 35742 - DNA, 21 bp, Artificial Sequence
  source: /note="Description of Artificial Sequence: Synthetic oligonucleotide"
aacagccaaagatacctcagc

SEQ ID NO: 35743 - DNA, 21 bp, Artificial Sequence
  source: /note="Description of Artificial Sequence: Synthetic oligonucleotide"
aacagccaaagcgcaacacca

SEQ ID NO: 35744 - DNA, 21 bp, Artificial Sequence
  source: /note="Description of Artificial Sequence: Synthetic oligonucleotide"
aacagcagagcagtcctcgtc

SEQ ID NO: 35745 - DNA, 21 bp, Artificial Sequence
  source: /note="Description of Artificial Sequence: Synthetic oligonucleotide"
aacagcagagacctcctcaca

SEQ ID NO: 35746 - DNA, 21 bp, Artificial Sequence
  source: /note="Description of Artificial Sequence: Synthetic oligonucleotide"
aacagcagaggagcaagcctc

SEQ ID NO: 35747 - DNA, 21 bp, Artificial Sequence
  source: /note="Description of Artificial Sequence: Synthetic oligonucleotide"
aacagcagaggactcggacac

SEQ ID NO: 35748 - DNA, 21 bp, Artificial Sequence
  source: /note="Description of Artificial Sequence: Synthetic oligonucleotide"
aacagcagaggaatgccagac

SEQ ID NO: 35749 - DNA, 21 bp, Artificial Sequence
  source: /note="Description of Artificial Sequence: Synthetic oligonucleotide"
aacagcagaggaccagtcgca

SEQ ID NO: 35750 - DNA, 21 bp, Artificial Sequence
  source: /note="Description of Artificial Sequence: Synthetic oligonucleotide"
aacagcagactcgtcacaagc

SEQ ID NO: 35751 - DNA, 21 bp, Artificial Sequence
  source: /note="Description of Artificial Sequence: Synthetic oligonucleotide"
aacagcagaagcaacgaaagc

SEQ ID NO: 35752 - DNA, 21 bp, Artificial Sequence
  source: /note="Description of Artificial Sequence: Synthetic oligonucleotide"
aacagcagaagcacaccaaac

SEQ ID NO: 35753 - DNA, 21 bp, Artificial Sequence
  source: /note="Description of Artificial Sequence: Synthetic oligonucleotide"
aacagcagaacagcacacgaa

SEQ ID NO: 35754 - DNA, 21 bp, Artificial Sequence
  source: /note="Description of Artificial Sequence: Synthetic oligonucleotide"
aacagcagaacagtccaaatc

SEQ ID NO: 35755 - DNA, 21 bp, Artificial Sequence
  source: /note="Description of Artificial Sequence: Synthetic oligonucleotide"
aacagcagagtcgtcggattc

SEQ ID NO: 35756 - DNA, 21 bp, Artificial Sequence
  source: /note="Description of Artificial Sequence: Synthetic oligonucleotide"
aacagcagcgaatggccagac

SEQ ID NO: 35757 - DNA, 21 bp, Artificial Sequence
  source: /note="Description of Artificial Sequence: Synthetic oligonucleotide"
aacagcagcggaaaaacacca

SEQ ID NO: 35758 - DNA, 21 bp, Artificial Sequence
  source: /note="Description of Artificial Sequence: Synthetic oligonucleotide"
aacagcagcatcagaaacgca

SEQ ID NO: 35759 - DNA, 21 bp, Artificial Sequence
  source: /note="Description of Artificial Sequence: Synthetic oligonucleotide"
aacagcagcctcaaactcaac

SEQ ID NO: 35760 - DNA, 21 bp, Artificial Sequence
  source: /note="Description of Artificial Sequence: Synthetic oligonucleotide"
aacagcagcatgagaatcaac

SEQ ID NO: 35761 - DNA, 21 bp, Artificial Sequence
  source: /note="Description of Artificial Sequence: Synthetic oligonucleotide"
aacagcagcatgagcagcgga

SEQ ID NO: 35762 - DNA, 21 bp, Artificial Sequence
  source: /note="Description of Artificial Sequence: Synthetic oligonucleotide"
aacagcagcccaagcctcgca

SEQ ID NO: 35763 - DNA, 21 bp, Artificial Sequence
  source: /note="Description of Artificial Sequence: Synthetic oligonucleotide"
aacagcagccaagtccacctc

SEQ ID NO: 35764 - DNA, 21 bp, Artificial Sequence
  source: /note="Description of Artificial Sequence: Synthetic oligonucleotide"
aacagcagcagcacaccaatc

SEQ ID NO: 35765 - DNA, 21 bp, Artificial Sequence
  source: /note="Description of Artificial Sequence: Synthetic oligonucleotide"
aacagcacaaaactcctcgac

SEQ ID NO: 35766 - DNA, 21 bp, Artificial Sequence
  source: /note="Description of Artificial Sequence: Synthetic oligonucleotide"
aacagcacactcgaaggaaga

SEQ ID NO: 35767 - DNA, 21 bp, Artificial Sequence
  source: /note="Description of Artificial Sequence: Synthetic oligonucleotide"
aacagcacactcacagtccac

SEQ ID NO: 35768 - DNA, 21 bp, Artificial Sequence
  source: /note="Description of Artificial Sequence: Synthetic oligonucleotide"
aacagcacaaacttcagaaca

SEQ ID NO: 35769 - DNA, 21 bp, Artificial Sequence
  source: /note="Description of Artificial Sequence: Synthetic oligonucleotide"
aacagcacaccacaaccacaa

SEQ ID NO: 35770 - DNA, 21 bp, Artificial Sequence
  source: /note="Description of Artificial Sequence: Synthetic oligonucleotide"
aacagcacaagcacatacgga

SEQ ID NO: 35771 - DNA, 21 bp, Artificial Sequence
  source: /note="Description of Artificial Sequence: Synthetic oligonucleotide"
aacagcgtcaaaggagtcgtc

SEQ ID NO: 35772 - DNA, 21 bp, Artificial Sequence
  source: /note="Description of Artificial Sequence: Synthetic oligonucleotide"
aacagcgtcagacacaacagc

SEQ ID NO: 35773 - DNA, 21 bp, Artificial Sequence
  source: /note="Description of Artificial Sequence: Synthetic oligonucleotide"
aacagcgtcagcggagtcaca

SEQ ID NO: 35774 - DNA, 21 bp, Artificial Sequence
  source: /note="Description of Artificial Sequence: Synthetic oligonucleotide"
aacagcgtcagccaaatgtac

SEQ ID NO: 35775 - DNA, 21 bp, Artificial Sequence
  source: /note="Description of Artificial Sequence: Synthetic oligonucleotide"
aacagcgtctacgacagaagc

SEQ ID NO: 35776 - DNA, 21 bp, Artificial Sequence
  source: /note="Description of Artificial Sequence: Synthetic oligonucleotide"
aacagctaccaagtcagcaga

SEQ ID NO: 35777 - DNA, 21 bp, Artificial Sequence
  source: /note="Description of Artificial Sequence: Synthetic oligonucleotide"
aacacagcaggaaaaccaagc

SEQ ID NO: 35778 - DNA, 21 bp, Artificial Sequence
  source: /note="Description of Artificial Sequence: Synthetic oligonucleotide"
aacacagcaagagaaagaagc

SEQ ID NO: 35779 - DNA, 21 bp, Artificial Sequence
  source: /note="Description of Artificial Sequence: Synthetic oligonucleotide"
aacacagcaagaacaagcctc

SEQ ID NO: 35780 - DNA, 21 bp, Artificial Sequence
  source: /note="Description of Artificial Sequence: Synthetic oligonucleotide"
aacacagacggagacagactc

SEQ ID NO: 35781 - DNA, 21 bp, Artificial Sequence
  source: /note="Description of Artificial Sequence: Synthetic oligonucleotide"
aacacagaagacgtccacatg

SEQ ID NO: 35782 - DNA, 21 bp, Artificial Sequence
  source: /note="Description of Artificial Sequence: Synthetic oligonucleotide"
aacacagaacacaacagaagc

SEQ ID NO: 35783 - DNA, 21 bp, Artificial Sequence
  source: /note="Description of Artificial Sequence: Synthetic oligonucleotide"
aacacagaaacaccactcgca

SEQ ID NO: 35784 - DNA, 21 bp, Artificial Sequence
  source: /note="Description of Artificial Sequence: Synthetic oligonucleotide"
aacacattcagcaacagcagc

SEQ ID NO: 35785 - DNA, 21 bp, Artificial Sequence
  source: /note="Description of Artificial Sequence: Synthetic oligonucleotide"
aacacaggaccaggaatggca

SEQ ID NO: 35786 - DNA, 21 bp, Artificial Sequence
  source: /note="Description of Artificial Sequence: Synthetic oligonucleotide"
aacacacacggagcagcacaa

SEQ ID NO: 35787 - DNA, 21 bp, Artificial Sequence
  source: /note="Description of Artificial Sequence: Synthetic oligonucleotide"
aacacacacccaacaccattc

SEQ ID NO: 35788 - DNA, 21 bp, Artificial Sequence
  source: /note="Description of Artificial Sequence: Synthetic oligonucleotide"
aacacacacacaaaaatgagc

SEQ ID NO: 35789 - DNA, 21 bp, Artificial Sequence
  source: /note="Description of Artificial Sequence: Synthetic oligonucleotide"
aacacacacgtcgaagactgg

SEQ ID NO: 35790 - DNA, 21 bp, Artificial Sequence
  source: /note="Description of Artificial Sequence: Synthetic oligonucleotide"
aacacaatcccaaacgtcaaa

SEQ ID NO: 35791 - DNA, 21 bp, Artificial Sequence
  source: /note="Description of Artificial Sequence: Synthetic oligonucleotide"
aacacaatcagagacagcatc

SEQ ID NO: 35792 - DNA, 21 bp, Artificial Sequence
  source: /note="Description of Artificial Sequence: Synthetic oligonucleotide"
aacacaatcagcggaagcaga

SEQ ID NO: 35793 - DNA, 21 bp, Artificial Sequence
  source: /note="Description of Artificial Sequence: Synthetic oligonucleotide"
aacacaaaactcacaaacaac

SEQ ID NO: 35794 - DNA, 21 bp, Artificial Sequence
  source: /note="Description of Artificial Sequence: Synthetic oligonucleotide"
aacacaaaaaacaacaacctc

SEQ ID NO: 35795 - DNA, 21 bp, Artificial Sequence
  source: /note="Description of Artificial Sequence: Synthetic oligonucleotide"
aacacaaaaagcgacccagca

SEQ ID NO: 35796 - DNA, 21 bp, Artificial Sequence
  source: /note="Description of Artificial Sequence: Synthetic oligonucleotide"
aacacaaaaagcccattcagc

SEQ ID NO: 35797 - DNA, 21 bp, Artificial Sequence
  source: /note="Description of Artificial Sequence: Synthetic oligonucleotide"
aacacactcggagaaacactc

SEQ ID NO: 35798 - DNA, 21 bp, Artificial Sequence
  source: /note="Description of Artificial Sequence: Synthetic oligonucleotide"
aacacactcaaactcagccaa

SEQ ID NO: 35799 - DNA, 21 bp, Artificial Sequence
  source: /note="Description of Artificial Sequence: Synthetic oligonucleotide"
aacacactccaaagctaccca

SEQ ID NO: 35800 - DNA, 21 bp, Artificial Sequence
  source: /note="Description of Artificial Sequence: Synthetic oligonucleotide"
aacacaaacatcccaagaagc

SEQ ID NO: 35801 - DNA, 21 bp, Artificial Sequence
  source: /note="Description of Artificial Sequence: Synthetic oligonucleotide"
aacacaaacgtcgaaagcaga

SEQ ID NO: 35802 - DNA, 21 bp, Artificial Sequence
  source: /note="Description of Artificial Sequence: Synthetic oligonucleotide"
aacacaaacgtcagcgtcagc

SEQ ID NO: 35803 - DNA, 21 bp, Artificial Sequence
  source: /note="Description of Artificial Sequence: Synthetic oligonucleotide"
aacacaccaagagtcctcagc

SEQ ID NO: 35804 - DNA, 21 bp, Artificial Sequence
  source: /note="Description of Artificial Sequence: Synthetic oligonucleotide"
aacacaccaagcacaagacaa

SEQ ID NO: 35805 - DNA, 21 bp, Artificial Sequence
  source: /note="Description of Artificial Sequence: Synthetic oligonucleotide"
aacacaagaggaggaagcagc

SEQ ID NO: 35806 - DNA, 21 bp, Artificial Sequence
  source: /note="Description of Artificial Sequence: Synthetic oligonucleotide"
aacacaagacacgacgtcagc

SEQ ID NO: 35807 - DNA, 21 bp, Artificial Sequence
  source: /note="Description of Artificial Sequence: Synthetic oligonucleotide"
aacacaagaaacgacccacca

SEQ ID NO: 35808 - DNA, 21 bp, Artificial Sequence
  source: /note="Description of Artificial Sequence: Synthetic oligonucleotide"
aacacaagacaactcgtcagc

SEQ ID NO: 35809 - DNA, 21 bp, Artificial Sequence
  source: /note="Description of Artificial Sequence: Synthetic oligonucleotide"
aacacaagaagaacagacgga

SEQ ID NO: 35810 - DNA, 21 bp, Artificial Sequence
  source: /note="Description of Artificial Sequence: Synthetic oligonucleotide"
aacacaagaacactcagcaac

SEQ ID NO: 35811 - DNA, 21 bp, Artificial Sequence
  source: /note="Description of Artificial Sequence: Synthetic oligonucleotide"
aacacaagaacatacagcagc

SEQ ID NO: 35812 - DNA, 21 bp, Artificial Sequence
  source: /note="Description of Artificial Sequence: Synthetic oligonucleotide"
aacacaagcgacaacgcaaga

SEQ ID NO: 35813 - DNA, 21 bp, Artificial Sequence
  source: /note="Description of Artificial Sequence: Synthetic oligonucleotide"
aacacaagcttcagcagcagc

SEQ ID NO: 35814 - DNA, 21 bp, Artificial Sequence
  source: /note="Description of Artificial Sequence: Synthetic oligonucleotide"
aacacaagcaaagacctccca

SEQ ID NO: 35815 - DNA, 21 bp, Artificial Sequence
  source: /note="Description of Artificial Sequence: Synthetic oligonucleotide"
aacacaagccaattcgcaagc

SEQ ID NO: 35816 - DNA, 21 bp, Artificial Sequence
  source: /note="Description of Artificial Sequence: Synthetic oligonucleotide"
aacacaagcagcagcgacaaa

SEQ ID NO: 35817 - DNA, 21 bp, Artificial Sequence
  source: /note="Description of Artificial Sequence: Synthetic oligonucleotide"
aacacaagcgtcatgatggtc

SEQ ID NO: 35818 - DNA, 21 bp, Artificial Sequence
  source: /note="Description of Artificial Sequence: Synthetic oligonucleotide"
aacacaagcgtcagagtcgtc

SEQ ID NO: 35819 - DNA, 21 bp, Artificial Sequence
  source: /note="Description of Artificial Sequence: Synthetic oligonucleotide"
aacacaagctggaacggaagc

SEQ ID NO: 35820 - DNA, 21 bp, Artificial Sequence
  source: /note="Description of Artificial Sequence: Synthetic oligonucleotide"
aacacaacaaacagccaactc

SEQ ID NO: 35821 - DNA, 21 bp, Artificial Sequence
  source: /note="Description of Artificial Sequence: Synthetic oligonucleotide"
aacacaacaccaatcacaaac

SEQ ID NO: 35822 - DNA, 21 bp, Artificial Sequence
  source: /note="Description of Artificial Sequence: Synthetic oligonucleotide"
aacacaacagtcctcccaaaa

SEQ ID NO: 35823 - DNA, 21 bp, Artificial Sequence
  source: /note="Description of Artificial Sequence: Synthetic oligonucleotide"
aacacagtcccaatcaaagca

SEQ ID NO: 35824 - DNA, 21 bp, Artificial Sequence
  source: /note="Description of Artificial Sequence: Synthetic oligonucleotide"
aacacatacagaagagacgga

SEQ ID NO: 35825 - DNA, 21 bp, Artificial Sequence
  source: /note="Description of Artificial Sequence: Synthetic oligonucleotide"
aacgtcgcagcaagagcacac

SEQ ID NO: 35826 - DNA, 21 bp, Artificial Sequence
  source: /note="Description of Artificial Sequence: Synthetic oligonucleotide"
aacgtcgcaatcaacttcagc

SEQ ID NO: 35827 - DNA, 21 bp, Artificial Sequence
  source: /note="Description of Artificial Sequence: Synthetic oligonucleotide"
aacgtcgcaagaaacttcgtc

SEQ ID NO: 35828 - DNA, 21 bp, Artificial Sequence
  source: /note="Description of Artificial Sequence: Synthetic oligonucleotide"
aacgtcgcagtcggataccaa

SEQ ID NO: 35829 - DNA, 21 bp, Artificial Sequence
  source: /note="Description of Artificial Sequence: Synthetic oligonucleotide"
aacgtcgcagtcgtcctcagc

SEQ ID NO: 35830 - DNA, 21 bp, Artificial Sequence
  source: /note="Description of Artificial Sequence: Synthetic oligonucleotide"
aacgtcgcatgggtcacagaa

SEQ ID NO: 35831 - DNA, 21 bp, Artificial Sequence
  source: /note="Description of Artificial Sequence: Synthetic oligonucleotide"
aacgtcgacgcaaacgtcctc

SEQ ID NO: 35832 - DNA, 21 bp, Artificial Sequence
  source: /note="Description of Artificial Sequence: Synthetic oligonucleotide"
aacgtcgacacaagcacagac

SEQ ID NO: 35833 - DNA, 21 bp, Artificial Sequence
  source: /note="Description of Artificial Sequence: Synthetic oligonucleotide"
aacgtcgaacaaccaagctgc

SEQ ID NO: 35834 - DNA, 21 bp, Artificial Sequence
  source: /note="Description of Artificial Sequence: Synthetic oligonucleotide"
aacgtcgaaagcaacccactc

SEQ ID NO: 35835 - DNA, 21 bp, Artificial Sequence
  source: /note="Description of Artificial Sequence: Synthetic oligonucleotide"
aacgtcttcgcagtctgcgaa

SEQ ID NO: 35836 - DNA, 21 bp, Artificial Sequence
  source: /note="Description of Artificial Sequence: Synthetic oligonucleotide"
aacgtcttcagcgcaacacca

SEQ ID NO: 35837 - DNA, 21 bp, Artificial Sequence
  source: /note="Description of Artificial Sequence: Synthetic oligonucleotide"
aacgtcttcgtcgcagtcaac

SEQ ID NO: 35838 - DNA, 21 bp, Artificial Sequence
  source: /note="Description of Artificial Sequence: Synthetic oligonucleotide"
aacgtcggagcaacagaagtc

SEQ ID NO: 35839 - DNA, 21 bp, Artificial Sequence
  source: /note="Description of Artificial Sequence: Synthetic oligonucleotide"
aacgtccacgcactcgaaagc

SEQ ID NO: 35840 - DNA, 21 bp, Artificial Sequence
  source: /note="Description of Artificial Sequence: Synthetic oligonucleotide"
aacgtccacacaccaagccaa

SEQ ID NO: 35841 - DNA, 21 bp, Artificial Sequence
  source: /note="Description of Artificial Sequence: Synthetic oligonucleotide"
aacgtcatcaacacaccacaa

SEQ ID NO: 35842 - DNA, 21 bp, Artificial Sequence
  source: /note="Description of Artificial Sequence: Synthetic oligonucleotide"
aacgtcaaactcaacagcttc

SEQ ID NO: 35843 - DNA, 21 bp, Artificial Sequence
  source: /note="Description of Artificial Sequence: Synthetic oligonucleotide"
aacgtcctcggagcacaacaa

SEQ ID NO: 35844 - DNA, 21 bp, Artificial Sequence
  source: /note="Description of Artificial Sequence: Synthetic oligonucleotide"
aacgtcctcatcaaatacagc

SEQ ID NO: 35845 - DNA, 21 bp, Artificial Sequence
  source: /note="Description of Artificial Sequence: Synthetic oligonucleotide"
aacgtcctcagaccacaagtc

SEQ ID NO: 35846 - DNA, 21 bp, Artificial Sequence
  source: /note="Description of Artificial Sequence: Synthetic oligonucleotide"
aacgtcatgatggcaagaatg

SEQ ID NO: 35847 - DNA, 21 bp, Artificial Sequence
  source: /note="Description of Artificial Sequence: Synthetic oligonucleotide"
aacgtcatggtcagactccca

SEQ ID NO: 35848 - DNA, 21 bp, Artificial Sequence
  source: /note="Description of Artificial Sequence: Synthetic oligonucleotide"
aacgtcatggtcagaatggga

SEQ ID NO: 35849 - DNA, 21 bp, Artificial Sequence
  source: /note="Description of Artificial Sequence: Synthetic oligonucleotide"
aacgtcaaccaaccagacaca

SEQ ID NO: 35850 - DNA, 21 bp, Artificial Sequence
  source: /note="Description of Artificial Sequence: Synthetic oligonucleotide"
aacgtcaaccaatacagcgga

SEQ ID NO: 35851 - DNA, 21 bp, Artificial Sequence
  source: /note="Description of Artificial Sequence: Synthetic oligonucleotide"
aacgtcccagcagcaagctac

SEQ ID NO: 35852 - DNA, 21 bp, Artificial Sequence
  source: /note="Description of Artificial Sequence: Synthetic oligonucleotide"
aacgtcccagcagcaacattc

SEQ ID NO: 35853 - DNA, 21 bp, Artificial Sequence
  source: /note="Description of Artificial Sequence: Synthetic oligonucleotide"
aacgtcccagaaagcagcgac

SEQ ID NO: 35854 - DNA, 21 bp, Artificial Sequence
  source: /note="Description of Artificial Sequence: Synthetic oligonucleotide"
aacgtcccaagcacaaaagaa

SEQ ID NO: 35855 - DNA, 21 bp, Artificial Sequence
  source: /note="Description of Artificial Sequence: Synthetic oligonucleotide"
aacgtccaagcaacaggatac

SEQ ID NO: 35856 - DNA, 21 bp, Artificial Sequence
  source: /note="Description of Artificial Sequence: Synthetic oligonucleotide"
aacgtccaattcagcagcgga

SEQ ID NO: 35857 - DNA, 21 bp, Artificial Sequence
  source: /note="Description of Artificial Sequence: Synthetic oligonucleotide"
aacgtcagactccaagcaatc

SEQ ID NO: 35858 - DNA, 21 bp, Artificial Sequence
  source: /note="Description of Artificial Sequence: Synthetic oligonucleotide"
aacgtcagactcagcatcgac

SEQ ID NO: 35859 - DNA, 21 bp, Artificial Sequence
  source: /note="Description of Artificial Sequence: Synthetic oligonucleotide"
aacgtcagaccacaaagcaca

SEQ ID NO: 35860 - DNA, 21 bp, Artificial Sequence
  source: /note="Description of Artificial Sequence: Synthetic oligonucleotide"
aacgtcagaccagtcctcagc

SEQ ID NO: 35861 - DNA, 21 bp, Artificial Sequence
  source: /note="Description of Artificial Sequence: Synthetic oligonucleotide"
aacgtcagacaacaaagcgca

SEQ ID NO: 35862 - DNA, 21 bp, Artificial Sequence
  source: /note="Description of Artificial Sequence: Synthetic oligonucleotide"
aacgtcagaagcgtcacaaac

SEQ ID NO: 35863 - DNA, 21 bp, Artificial Sequence
  source: /note="Description of Artificial Sequence: Synthetic oligonucleotide"
aacgtcagaagctacgcagca

SEQ ID NO: 35864 - DNA, 21 bp, Artificial Sequence
  source: /note="Description of Artificial Sequence: Synthetic oligonucleotide"
aacgtcagaacagtcgcagaa

SEQ ID NO: 35865 - DNA, 21 bp, Artificial Sequence
  source: /note="Description of Artificial Sequence: Synthetic oligonucleotide"
aacgtcagcttcccaagcctc

SEQ ID NO: 35866 - DNA, 21 bp, Artificial Sequence
  source: /note="Description of Artificial Sequence: Synthetic oligonucleotide"
aacgtcagcaacgtcccaagc

SEQ ID NO: 35867 - DNA, 21 bp, Artificial Sequence
  source: /note="Description of Artificial Sequence: Synthetic oligonucleotide"
aacgtcagcccactcttcctc

SEQ ID NO: 35868 - DNA, 21 bp, Artificial Sequence
  source: /note="Description of Artificial Sequence: Synthetic oligonucleotide"
aacgtcagcagaacaacactc

SEQ ID NO: 35869 - DNA, 21 bp, Artificial Sequence
  source: /note="Description of Artificial Sequence: Synthetic oligonucleotide"
aacgtcagcagaacagtcagc

SEQ ID NO: 35870 - DNA, 21 bp, Artificial Sequence
  source: /note="Description of Artificial Sequence: Synthetic oligonucleotide"
aacgtcagcagcgcaccaaaa

SEQ ID NO: 35871 - DNA, 21 bp, Artificial Sequence
  source: /note="Description of Artificial Sequence: Synthetic oligonucleotide"
aacgtcagcacagcactcagc

SEQ ID NO: 35872 - DNA, 21 bp, Artificial Sequence
  source: /note="Description of Artificial Sequence: Synthetic oligonucleotide"
aacgtcacagcaatcggactc

SEQ ID NO: 35873 - DNA, 21 bp, Artificial Sequence
  source: /note="Description of Artificial Sequence: Synthetic oligonucleotide"
aacgtcacaccaccagacaac

SEQ ID NO: 35874 - DNA, 21 bp, Artificial Sequence
  source: /note="Description of Artificial Sequence: Synthetic oligonucleotide"
aacgtcacaacaagcgaagca

SEQ ID NO: 35875 - DNA, 21 bp, Artificial Sequence
  source: /note="Description of Artificial Sequence: Synthetic oligonucleotide"
aacgtcgtcccaccactcaca

SEQ ID NO: 35876 - DNA, 21 bp, Artificial Sequence
  source: /note="Description of Artificial Sequence: Synthetic oligonucleotide"
aacgtcgtcagcagaagccca

SEQ ID NO: 35877 - DNA, 21 bp, Artificial Sequence
  source: /note="Description of Artificial Sequence: Synthetic oligonucleotide"
aacgtcgtcacaaaaccaatg

SEQ ID NO: 35878 - DNA, 21 bp, Artificial Sequence
  source: /note="Description of Artificial Sequence: Synthetic oligonucleotide"
aacgtcgtcgtcccagtcgga

SEQ ID NO: 35879 - DNA, 21 bp, Artificial Sequence
  source: /note="Description of Artificial Sequence: Synthetic oligonucleotide"
aactgggcaagcgaccacgtc

SEQ ID NO: 35880 - DNA, 21 bp, Artificial Sequence
  source: /note="Description of Artificial Sequence: Synthetic oligonucleotide"
aactggggacaagaaaaactc

SEQ ID NO: 35881 - DNA, 21 bp, Artificial Sequence
  source: /note="Description of Artificial Sequence: Synthetic oligonucleotide"
aactggccagacccagaaagc

SEQ ID NO: 35882 - DNA, 21 bp, Artificial Sequence
  source: /note="Description of Artificial Sequence: Synthetic oligonucleotide"
aactggacagcagcaacacca

SEQ ID NO: 35883 - DNA, 21 bp, Artificial Sequence
  source: /note="Description of Artificial Sequence: Synthetic oligonucleotide"
aactacgcaggaagcgacgga

SEQ ID NO: 35884 - DNA, 21 bp, Artificial Sequence
  source: /note="Description of Artificial Sequence: Synthetic oligonucleotide"
aactacgcaaaagtccacaca

SEQ ID NO: 35885 - DNA, 21 bp, Artificial Sequence
  source: /note="Description of Artificial Sequence: Synthetic oligonucleotide"
aactacgcaagccaaatcgtc

SEQ ID NO: 35886 - DNA, 21 bp, Artificial Sequence
  source: /note="Description of Artificial Sequence: Synthetic oligonucleotide"
aactacgacagagaacaaatg

SEQ ID NO: 35887 - DNA, 21 bp, Artificial Sequence
  source: /note="Description of Artificial Sequence: Synthetic oligonucleotide"
aactacgaaccaacaagcgac

SEQ ID NO: 35888 - DNA, 21 bp, Artificial Sequence
  source: /note="Description of Artificial Sequence: Synthetic oligonucleotide"
aactacggaaacagcatccca

SEQ ID NO: 35889 - DNA, 21 bp, Artificial Sequence
  source: /note="Description of Artificial Sequence: Synthetic oligonucleotide"
aactaccacacaagcctcgtc

SEQ ID NO: 35890 - DNA, 21 bp, Artificial Sequence
  source: /note="Description of Artificial Sequence: Synthetic oligonucleotide"
aactacaacacaccaaaccca

SEQ ID NO: 35891 - DNA, 21 bp, Artificial Sequence
  source: /note="Description of Artificial Sequence: Synthetic oligonucleotide"
aactacccagacacaccaaac

SEQ ID NO: 35892 - DNA, 21 bp, Artificial Sequence
  source: /note="Description of Artificial Sequence: Synthetic oligonucleotide"
aactacccagacgtcagaagc

SEQ ID NO: 35893 - DNA, 21 bp, Artificial Sequence
  source: /note="Description of Artificial Sequence: Synthetic oligonucleotide"
aactacccaccaagcagactc

SEQ ID NO: 35894 - DNA, 21 bp, Artificial Sequence
  source: /note="Description of Artificial Sequence: Synthetic oligonucleotide"
aactacagacaaacactcagc

SEQ ID NO: 35895 - DNA, 21 bp, Artificial Sequence
  source: /note="Description of Artificial Sequence: Synthetic oligonucleotide"
ccagcagcagacagaaacctc

SEQ ID NO: 35896 - DNA, 21 bp, Artificial Sequence
  source: /note="Description of Artificial Sequence: Synthetic oligonucleotide"
ccagcagcagaattcgcaagc

SEQ ID NO: 35897 - DNA, 21 bp, Artificial Sequence
  source: /note="Description of Artificial Sequence: Synthetic oligonucleotide"
ccagcagcaagagaaagactc

SEQ ID NO: 35898 - DNA, 21 bp, Artificial Sequence
  source: /note="Description of Artificial Sequence: Synthetic oligonucleotide"
ccagcagacctcggaagcatg

SEQ ID NO: 35899 - DNA, 21 bp, Artificial Sequence
  source: /note="Description of Artificial Sequence: Synthetic oligonucleotide"
ccagcagacaacggaccatgg

SEQ ID NO: 35900 - DNA, 21 bp, Artificial Sequence
  source: /note="Description of Artificial Sequence: Synthetic oligonucleotide"
ccagcagacccaccaagcgtc

SEQ ID NO: 35901 - DNA, 21 bp, Artificial Sequence
  source: /note="Description of Artificial Sequence: Synthetic oligonucleotide"
ccagcagacagaagcccaaca

SEQ ID NO: 35902 - DNA, 21 bp, Artificial Sequence
  source: /note="Description of Artificial Sequence: Synthetic oligonucleotide"
ccagcagactaccaaaaagac

SEQ ID NO: 35903 - DNA, 21 bp, Artificial Sequence
  source: /note="Description of Artificial Sequence: Synthetic oligonucleotide"
ccagcagaaaaagtcagaaca

SEQ ID NO: 35904 - DNA, 21 bp, Artificial Sequence
  source: /note="Description of Artificial Sequence: Synthetic oligonucleotide"
ccagcattcagcggaagagac

SEQ ID NO: 35905 - DNA, 21 bp, Artificial Sequence
  source: /note="Description of Artificial Sequence: Synthetic oligonucleotide"
ccagcattcagcatgagcatc

SEQ ID NO: 35906 - DNA, 21 bp, Artificial Sequence
  source: /note="Description of Artificial Sequence: Synthetic oligonucleotide"
ccagcaggactcccagacaga

SEQ ID NO: 35907 - DNA, 21 bp, Artificial Sequence
  source: /note="Description of Artificial Sequence: Synthetic oligonucleotide"
ccagcaggaagccaaccacca

SEQ ID NO: 35908 - DNA, 21 bp, Artificial Sequence
  source: /note="Description of Artificial Sequence: Synthetic oligonucleotide"
ccagcaggaagcacaatgcca

SEQ ID NO: 35909 - DNA, 21 bp, Artificial Sequence
  source: /note="Description of Artificial Sequence: Synthetic oligonucleotide"
ccagcacacgcactcacaatg

SEQ ID NO: 35910 - DNA, 21 bp, Artificial Sequence
  source: /note="Description of Artificial Sequence: Synthetic oligonucleotide"
ccagcacacttcacaacagga

SEQ ID NO: 35911 - DNA, 21 bp, Artificial Sequence
  source: /note="Description of Artificial Sequence: Synthetic oligonucleotide"
ccagcaatcggagtccacaga

SEQ ID NO: 35912 - DNA, 21 bp, Artificial Sequence
  source: /note="Description of Artificial Sequence: Synthetic oligonucleotide"
ccagcaatcaaaagccaactc

SEQ ID NO: 35913 - DNA, 21 bp, Artificial Sequence
  source: /note="Description of Artificial Sequence: Synthetic oligonucleotide"
ccagcaatcctcagaacaagc

SEQ ID NO: 35914 - DNA, 21 bp, Artificial Sequence
  source: /note="Description of Artificial Sequence: Synthetic oligonucleotide"
ccagcaatcagcggaacaatc

SEQ ID NO: 35915 - DNA, 21 bp, Artificial Sequence
  source: /note="Description of Artificial Sequence: Synthetic oligonucleotide"
ccagcaaaaccaatcgacttc

SEQ ID NO: 35916 - DNA, 21 bp, Artificial Sequence
  source: /note="Description of Artificial Sequence: Synthetic oligonucleotide"
ccagcactcgcaccaatctac

SEQ ID NO: 35917 - DNA, 21 bp, Artificial Sequence
  source: /note="Description of Artificial Sequence: Synthetic oligonucleotide"
ccagcactcatggcaccagca

SEQ ID NO: 35918 - DNA, 21 bp, Artificial Sequence
  source: /note="Description of Artificial Sequence: Synthetic oligonucleotide"
ccagcaatgggacaaagcgac

SEQ ID NO: 35919 - DNA, 21 bp, Artificial Sequence
  source: /note="Description of Artificial Sequence: Synthetic oligonucleotide"
ccagcaatgagcgacagaagc

SEQ ID NO: 35920 - DNA, 21 bp, Artificial Sequence
  source: /note="Description of Artificial Sequence: Synthetic oligonucleotide"
ccagcaatgagcaacacaatc

SEQ ID NO: 35921 - DNA, 21 bp, Artificial Sequence
  source: /note="Description of Artificial Sequence: Synthetic oligonucleotide"
ccagcaaacgacgcagacaga

SEQ ID NO: 35922 - DNA, 21 bp, Artificial Sequence
  source: /note="Description of Artificial Sequence: Synthetic oligonucleotide"
ccagcaaacctcacaagccca

SEQ ID NO: 35923 - DNA, 21 bp, Artificial Sequence
  source: /note="Description of Artificial Sequence: Synthetic oligonucleotide"
ccagcaaacccaccagacagc

SEQ ID NO: 35924 - DNA, 21 bp, Artificial Sequence
  source: /note="Description of Artificial Sequence: Synthetic oligonucleotide"
ccagcaaacccaccaaaaagc

SEQ ID NO: 35925 - DNA, 21 bp, Artificial Sequence
  source: /note="Description of Artificial Sequence: Synthetic oligonucleotide"
ccagcaaacagagtcggaaca

SEQ ID NO: 35926 - DNA, 21 bp, Artificial Sequence
  source: /note="Description of Artificial Sequence: Synthetic oligonucleotide"
ccagcaaactacctcagcgtc

SEQ ID NO: 35927 - DNA, 21 bp, Artificial Sequence
  source: /note="Description of Artificial Sequence: Synthetic oligonucleotide"
ccagcaccaatgaacttccaa

SEQ ID NO: 35928 - DNA, 21 bp, Artificial Sequence
  source: /note="Description of Artificial Sequence: Synthetic oligonucleotide"
ccagcaccaagccaccaaagc

SEQ ID NO: 35929 - DNA, 21 bp, Artificial Sequence
  source: /note="Description of Artificial Sequence: Synthetic oligonucleotide"
ccagcaccaacaagcatcgca

SEQ ID NO: 35930 - DNA, 21 bp, Artificial Sequence
  source: /note="Description of Artificial Sequence: Synthetic oligonucleotide"
ccagcacaaagaacaatggca

SEQ ID NO: 35931 - DNA, 21 bp, Artificial Sequence
  source: /note="Description of Artificial Sequence: Synthetic oligonucleotide"
ccagcacaaagcacaggacca

SEQ ID NO: 35932 - DNA, 21 bp, Artificial Sequence
  source: /note="Description of Artificial Sequence: Synthetic oligonucleotide"
ccagcaagagcagacccagca

SEQ ID NO: 35933 - DNA, 21 bp, Artificial Sequence
  source: /note="Description of Artificial Sequence: Synthetic oligonucleotide"
ccagcaagagcattcgacgca

SEQ ID NO: 35934 - DNA, 21 bp, Artificial Sequence
  source: /note="Description of Artificial Sequence: Synthetic oligonucleotide"
ccagcaagaatcacaggaatg

SEQ ID NO: 35935 - DNA, 21 bp, Artificial Sequence
  source: /note="Description of Artificial Sequence: Synthetic oligonucleotide"
ccagcaagactcgcaacaaac

SEQ ID NO: 35936 - DNA, 21 bp, Artificial Sequence
  source: /note="Description of Artificial Sequence: Synthetic oligonucleotide"
ccagcaagaagaccagacgac

SEQ ID NO: 35937 - DNA, 21 bp, Artificial Sequence
  source: /note="Description of Artificial Sequence: Synthetic oligonucleotide"
ccagcaagaacactcatccac

SEQ ID NO: 35938 - DNA, 21 bp, Artificial Sequence
  source: /note="Description of Artificial Sequence: Synthetic oligonucleotide"
ccagcaagaacaaacccaaca

SEQ ID NO: 35939 - DNA, 21 bp, Artificial Sequence
  source: /note="Description of Artificial Sequence: Synthetic oligonucleotide"
ccagcaagaacacaagtcgac

SEQ ID NO: 35940 - DNA, 21 bp, Artificial Sequence
  source: /note="Description of Artificial Sequence: Synthetic oligonucleotide"
ccagcaagcgaaagaagcctc

SEQ ID NO: 35941 - DNA, 21 bp, Artificial Sequence
  source: /note="Description of Artificial Sequence: Synthetic oligonucleotide"
ccagcaagcttcggaatcaac

SEQ ID NO: 35942 - DNA, 21 bp, Artificial Sequence
  source: /note="Description of Artificial Sequence: Synthetic oligonucleotide"
ccagcaagccacatgaaccca

SEQ ID NO: 35943 - DNA, 21 bp, Artificial Sequence
  source: /note="Description of Artificial Sequence: Synthetic oligonucleotide"
ccagcaagcccactccacagc

SEQ ID NO: 35944 - DNA, 21 bp, Artificial Sequence
  source: /note="Description of Artificial Sequence: Synthetic oligonucleotide"
ccagcaagcccagtcacaagc

SEQ ID NO: 35945 - DNA, 21 bp, Artificial Sequence
  source: /note="Description of Artificial Sequence: Synthetic oligonucleotide"
ccagcaagcgtcatggcagga

SEQ ID NO: 35946 - DNA, 21 bp, Artificial Sequence
  source: /note="Description of Artificial Sequence: Synthetic oligonucleotide"
ccagcaacagcactcagcaga

SEQ ID NO: 35947 - DNA, 21 bp, Artificial Sequence
  source: /note="Description of Artificial Sequence: Synthetic oligonucleotide"
ccagcaacaggactcccatac

SEQ ID NO: 35948 - DNA, 21 bp, Artificial Sequence
  source: /note="Description of Artificial Sequence: Synthetic oligonucleotide"
ccagcaacaatgatcagacac

SEQ ID NO: 35949 - DNA, 21 bp, Artificial Sequence
  source: /note="Description of Artificial Sequence: Synthetic oligonucleotide"
ccagcaacaaacgtcagagga

SEQ ID NO: 35950 - DNA, 21 bp, Artificial Sequence
  source: /note="Description of Artificial Sequence: Synthetic oligonucleotide"
ccagcaacaccaagcgtcgtc

SEQ ID NO: 35951 - DNA, 21 bp, Artificial Sequence
  source: /note="Description of Artificial Sequence: Synthetic oligonucleotide"
ccagcaacaagcagcgtcagc

SEQ ID NO: 35952 - DNA, 21 bp, Artificial Sequence
  source: /note="Description of Artificial Sequence: Synthetic oligonucleotide"
ccagcagtcgaagcagacgga

SEQ ID NO: 35953 - DNA, 21 bp, Artificial Sequence
  source: /note="Description of Artificial Sequence: Synthetic oligonucleotide"
ccagcagtcaaaccaagcttc

SEQ ID NO: 35954 - DNA, 21 bp, Artificial Sequence
  source: /note="Description of Artificial Sequence: Synthetic oligonucleotide"
ccagcatacccacacgcacca

SEQ ID NO: 35955 - DNA, 21 bp, Artificial Sequence
  source: /note="Description of Artificial Sequence: Synthetic oligonucleotide"
ccagacgcagaaatcagaaga

SEQ ID NO: 35956 - DNA, 21 bp, Artificial Sequence
  source: /note="Description of Artificial Sequence: Synthetic oligonucleotide"
ccagacgacttcagacaccac

SEQ ID NO: 35957 - DNA, 21 bp, Artificial Sequence
  source: /note="Description of Artificial Sequence: Synthetic oligonucleotide"
ccagacgaactcaaagtcaga

SEQ ID NO: 35958 - DNA, 21 bp, Artificial Sequence
  source: /note="Description of Artificial Sequence: Synthetic oligonucleotide"
ccagacggagacacagcactc

SEQ ID NO: 35959 - DNA, 21 bp, Artificial Sequence
  source: /note="Description of Artificial Sequence: Synthetic oligonucleotide"
ccagacggaagcagcagacac

SEQ ID NO: 35960 - DNA, 21 bp, Artificial Sequence
  source: /note="Description of Artificial Sequence: Synthetic oligonucleotide"
ccagaccacgcaagcatcagc

SEQ ID NO: 35961 - DNA, 21 bp, Artificial Sequence
  source: /note="Description of Artificial Sequence: Synthetic oligonucleotide"
ccagaccacggaggaatcgca

SEQ ID NO: 35962 - DNA, 21 bp, Artificial Sequence
  source: /note="Description of Artificial Sequence: Synthetic oligonucleotide"
ccagaccacagaagcccaaac

SEQ ID NO: 35963 - DNA, 21 bp, Artificial Sequence
  source: /note="Description of Artificial Sequence: Synthetic oligonucleotide"
ccagaccacagcaacgaccaa

SEQ ID NO: 35964 - DNA, 21 bp, Artificial Sequence
  source: /note="Description of Artificial Sequence: Synthetic oligonucleotide"
ccagacatcgcattcgcagaa

SEQ ID NO: 35965 - DNA, 21 bp, Artificial Sequence
  source: /note="Description of Artificial Sequence: Synthetic oligonucleotide"
ccagacctcgaagtcgtcaaa

SEQ ID NO: 35966 - DNA, 21 bp, Artificial Sequence
  source: /note="Description of Artificial Sequence: Synthetic oligonucleotide"
ccagacctcatcagcgacgca

SEQ ID NO: 35967 - DNA, 21 bp, Artificial Sequence
  source: /note="Description of Artificial Sequence: Synthetic oligonucleotide"
ccagacctcccaggaatcaga

SEQ ID NO: 35968 - DNA, 21 bp, Artificial Sequence
  source: /note="Description of Artificial Sequence: Synthetic oligonucleotide"
ccagacaacctccaagtcagc

SEQ ID NO: 35969 - DNA, 21 bp, Artificial Sequence
  source: /note="Description of Artificial Sequence: Synthetic oligonucleotide"
ccagacaacgtcagaacattc

SEQ ID NO: 35970 - DNA, 21 bp, Artificial Sequence
  source: /note="Description of Artificial Sequence: Synthetic oligonucleotide"
ccagacaacgtctacaacgac

SEQ ID NO: 35971 - DNA, 21 bp, Artificial Sequence
  source: /note="Description of Artificial Sequence: Synthetic oligonucleotide"
ccagacccagcatacctccac

SEQ ID NO: 35972 - DNA, 21 bp, Artificial Sequence
  source: /note="Description of Artificial Sequence: Synthetic oligonucleotide"
ccagacccaatcgacagacca

SEQ ID NO: 35973 - DNA, 21 bp, Artificial Sequence
  source: /note="Description of Artificial Sequence: Synthetic oligonucleotide"
ccagacccaccaacaagccca

SEQ ID NO: 35974 - DNA, 21 bp, Artificial Sequence
  source: /note="Description of Artificial Sequence: Synthetic oligonucleotide"
ccagaccaagcaagcggaaga

SEQ ID NO: 35975 - DNA, 21 bp, Artificial Sequence
  source: /note="Description of Artificial Sequence: Synthetic oligonucleotide"
ccagaccaaatggtcagaatc

SEQ ID NO: 35976 - DNA, 21 bp, Artificial Sequence
  source: /note="Description of Artificial Sequence: Synthetic oligonucleotide"
ccagaccaaagaggaaaccac

SEQ ID NO: 35977 - DNA, 21 bp, Artificial Sequence
  source: /note="Description of Artificial Sequence: Synthetic oligonucleotide"
ccagaccaaagcctcacagga

SEQ ID NO: 35978 - DNA, 21 bp, Artificial Sequence
  source: /note="Description of Artificial Sequence: Synthetic oligonucleotide"
ccagacagactcctcgacaga

SEQ ID NO: 35979 - DNA, 21 bp, Artificial Sequence
  source: /note="Description of Artificial Sequence: Synthetic oligonucleotide"
ccagacagactcagcgaattc

SEQ ID NO: 35980 - DNA, 21 bp, Artificial Sequence
  source: /note="Description of Artificial Sequence: Synthetic oligonucleotide"
ccagacagaatgcaaaacaga

SEQ ID NO: 35981 - DNA, 21 bp, Artificial Sequence
  source: /note="Description of Artificial Sequence: Synthetic oligonucleotide"
ccagacagacaacaacaactc

SEQ ID NO: 35982 - DNA, 21 bp, Artificial Sequence
  source: /note="Description of Artificial Sequence: Synthetic oligonucleotide"
ccagacagagtcccaacagtc

SEQ ID NO: 35983 - DNA, 21 bp, Artificial Sequence
  source: /note="Description of Artificial Sequence: Synthetic oligonucleotide"
ccagacagcgcaccactccca

SEQ ID NO: 35984 - DNA, 21 bp, Artificial Sequence
  source: /note="Description of Artificial Sequence: Synthetic oligonucleotide"
ccagacagcgacccaccacac

SEQ ID NO: 35985 - DNA, 21 bp, Artificial Sequence
  source: /note="Description of Artificial Sequence: Synthetic oligonucleotide"
ccagacagcatgtacagaagc

SEQ ID NO: 35986 - DNA, 21 bp, Artificial Sequence
  source: /note="Description of Artificial Sequence: Synthetic oligonucleotide"
ccagacagcacactccaattc

SEQ ID NO: 35987 - DNA, 21 bp, Artificial Sequence
  source: /note="Description of Artificial Sequence: Synthetic oligonucleotide"
ccagacacagacccaccactc

SEQ ID NO: 35988 - DNA, 21 bp, Artificial Sequence
  source: /note="Description of Artificial Sequence: Synthetic oligonucleotide"
ccagacacaaaatggtgccac

SEQ ID NO: 35989 - DNA, 21 bp, Artificial Sequence
  source: /note="Description of Artificial Sequence: Synthetic oligonucleotide"
ccagacacaagccacgacctc

SEQ ID NO: 35990 - DNA, 21 bp, Artificial Sequence
  source: /note="Description of Artificial Sequence: Synthetic oligonucleotide"
ccagacgtcaaagcaggaaga

SEQ ID NO: 35991 - DNA, 21 bp, Artificial Sequence
  source: /note="Description of Artificial Sequence: Synthetic oligonucleotide"
ccagactacgcaaaactcagc

SEQ ID NO: 35992 - DNA, 21 bp, Artificial Sequence
  source: /note="Description of Artificial Sequence: Synthetic oligonucleotide"
ccagactacgaaaaaaaacaa

SEQ ID NO: 35993 - DNA, 21 bp, Artificial Sequence
  source: /note="Description of Artificial Sequence: Synthetic oligonucleotide"
ccagactacagcgcagtcctc

SEQ ID NO: 35994 - DNA, 21 bp, Artificial Sequence
  source: /note="Description of Artificial Sequence: Synthetic oligonucleotide"
ccagaagcagaagacgacatc

SEQ ID NO: 35995 - DNA, 21 bp, Artificial Sequence
  source: /note="Description of Artificial Sequence: Synthetic oligonucleotide"
ccagaagcactcagaacagga

SEQ ID NO: 35996 - DNA, 21 bp, Artificial Sequence
  source: /note="Description of Artificial Sequence: Synthetic oligonucleotide"
ccagaagaaccaagactcagc

SEQ ID NO: 35997 - DNA, 21 bp, Artificial Sequence
  source: /note="Description of Artificial Sequence: Synthetic oligonucleotide"
ccagaagaagtctgcagaatc

SEQ ID NO: 35998 - DNA, 21 bp, Artificial Sequence
  source: /note="Description of Artificial Sequence: Synthetic oligonucleotide"
ccagaattcgcaatcgacgca

SEQ ID NO: 35999 - DNA, 21 bp, Artificial Sequence
  source: /note="Description of Artificial Sequence: Synthetic oligonucleotide"
ccagaattcaaaacaagaaac

SEQ ID NO: 36000 - DNA, 21 bp, Artificial Sequence
  source: /note="Description of Artificial Sequence: Synthetic oligonucleotide"
ccagaaggaagactccacgca

SEQ ID NO: 36001 - DNA, 21 bp, Artificial Sequence
  source: /note="Description of Artificial Sequence: Synthetic oligonucleotide"
ccagaaaaagacacacacaga

SEQ ID NO: 36002 - DNA, 21 bp, Artificial Sequence
  source: /note="Description of Artificial Sequence: Synthetic oligonucleotide"
ccagaaaaatacagccaaaac

SEQ ID NO: 36003 - DNA, 21 bp, Artificial Sequence
  source: /note="Description of Artificial Sequence: Synthetic oligonucleotide"
ccagaaatgggaagactcgga

SEQ ID NO: 36004 - DNA, 21 bp, Artificial Sequence
  source: /note="Description of Artificial Sequence: Synthetic oligonucleotide"
ccagaaatgaaaccaggacaa

SEQ ID NO: 36005 - DNA, 21 bp, Artificial Sequence
  source: /note="Description of Artificial Sequence: Synthetic oligonucleotide"
ccagaaaacagcaaagtcgac

SEQ ID NO: 36006 - DNA, 21 bp, Artificial Sequence
  source: /note="Description of Artificial Sequence: Synthetic oligonucleotide"
ccagaaaacagccaaagagga

SEQ ID NO: 36007 - DNA, 21 bp, Artificial Sequence
  source: /note="Description of Artificial Sequence: Synthetic oligonucleotide"
ccagaaaacacaacatacgca

SEQ ID NO: 36008 - DNA, 21 bp, Artificial Sequence
  source: /note="Description of Artificial Sequence: Synthetic oligonucleotide"
ccagaaccaagcaacacaaga

SEQ ID NO: 36009 - DNA, 21 bp, Artificial Sequence
  source: /note="Description of Artificial Sequence: Synthetic oligonucleotide"
ccagaaccaacactcaacctc

SEQ ID NO: 36010 - DNA, 21 bp, Artificial Sequence
  source: /note="Description of Artificial Sequence: Synthetic oligonucleotide"
ccagaaagaggactccacgtc

SEQ ID NO: 36011 - DNA, 21 bp, Artificial Sequence
  source: /note="Description of Artificial Sequence: Synthetic oligonucleotide"
ccagaaagaaaagcacacaca

SEQ ID NO: 36012 - DNA, 21 bp, Artificial Sequence
  source: /note="Description of Artificial Sequence: Synthetic oligonucleotide"
ccagaaagaccagcactcagc

SEQ ID NO: 36013 - DNA, 21 bp, Artificial Sequence
  source: /note="Description of Artificial Sequence: Synthetic oligonucleotide"
ccagaaagaagccaagcagga

SEQ ID NO: 36014 - DNA, 21 bp, Artificial Sequence
  source: /note="Description of Artificial Sequence: Synthetic oligonucleotide"
ccagaaagaagcacatgggtc

SEQ ID NO: 36015 - DNA, 21 bp, Artificial Sequence
  source: /note="Description of Artificial Sequence: Synthetic oligonucleotide"
ccagaaagcaaagacgcacac

SEQ ID NO: 36016 - DNA, 21 bp, Artificial Sequence
  source: /note="Description of Artificial Sequence: Synthetic oligonucleotide"
ccagaaagcccaagaacactc

SEQ ID NO: 36017 - DNA, 21 bp, Artificial Sequence
  source: /note="Description of Artificial Sequence: Synthetic oligonucleotide"
ccagaaagcgtcctcagaaga

SEQ ID NO: 36018 - DNA, 21 bp, Artificial Sequence
  source: /note="Description of Artificial Sequence: Synthetic oligonucleotide"
ccagaaagctggccaagccca

SEQ ID NO: 36019 - DNA, 21 bp, Artificial Sequence
  source: /note="Description of Artificial Sequence: Synthetic oligonucleotide"
ccagaaacaagcccaagacca

SEQ ID NO: 36020 - DNA, 21 bp, Artificial Sequence
  source: /note="Description of Artificial Sequence: Synthetic oligonucleotide"
ccattcgcagaagcaggaatc

SEQ ID NO: 36021 - DNA, 21 bp, Artificial Sequence
  source: /note="Description of Artificial Sequence: Synthetic oligonucleotide"
ccattcgcaggacacgcactc

SEQ ID NO: 36022 - DNA, 21 bp, Artificial Sequence
  source: /note="Description of Artificial Sequence: Synthetic oligonucleotide"
ccattcgcacaaacactcaca

SEQ ID NO: 36023 - DNA, 21 bp, Artificial Sequence
  source: /note="Description of Artificial Sequence: Synthetic oligonucleotide"
ccattcgcaagcagcacaagc

SEQ ID NO: 36024 - DNA, 21 bp, Artificial Sequence
  source: /note="Description of Artificial Sequence: Synthetic oligonucleotide"
ccattcgaccacctcacagac

SEQ ID NO: 36025 - DNA, 21 bp, Artificial Sequence
  source: /note="Description of Artificial Sequence: Synthetic oligonucleotide"
ccattcggagtcagcgtcgac

SEQ ID NO: 36026 - DNA, 21 bp, Artificial Sequence
  source: /note="Description of Artificial Sequence: Synthetic oligonucleotide"
ccattcccacacgacagacca

SEQ ID NO: 36027 - DNA, 21 bp, Artificial Sequence
  source: /note="Description of Artificial Sequence: Synthetic oligonucleotide"
ccattccaaacaggaagcgga

SEQ ID NO: 36028 - DNA, 21 bp, Artificial Sequence
  source: /note="Description of Artificial Sequence: Synthetic oligonucleotide"
ccattcagaatccaaacagac

SEQ ID NO: 36029 - DNA, 21 bp, Artificial Sequence
  source: /note="Description of Artificial Sequence: Synthetic oligonucleotide"
ccattcagaccagtcgtcgac

SEQ ID NO: 36030 - DNA, 21 bp, Artificial Sequence
  source: /note="Description of Artificial Sequence: Synthetic oligonucleotide"
ccattcagcgacctcagaatg

SEQ ID NO: 36031 - DNA, 21 bp, Artificial Sequence
  source: /note="Description of Artificial Sequence: Synthetic oligonucleotide"
ccattcagcggactcacagga

SEQ ID NO: 36032 - DNA, 21 bp, Artificial Sequence
  source: /note="Description of Artificial Sequence: Synthetic oligonucleotide"
ccattcagcaacatccaaatg

SEQ ID NO: 36033 - DNA, 21 bp, Artificial Sequence
  source: /note="Description of Artificial Sequence: Synthetic oligonucleotide"
ccattcagcagcgcagtcatc

SEQ ID NO: 36034 - DNA, 21 bp, Artificial Sequence
  source: /note="Description of Artificial Sequence: Synthetic oligonucleotide"
ccattcagcagcccaagccca

SEQ ID NO: 36035 - DNA, 21 bp, Artificial Sequence
  source: /note="Description of Artificial Sequence: Synthetic oligonucleotide"
ccattcagcacaccagacatg

SEQ ID NO: 36036 - DNA, 21 bp, Artificial Sequence
  source: /note="Description of Artificial Sequence: Synthetic oligonucleotide"
ccattcacagcaggattcagc

SEQ ID NO: 36037 - DNA, 21 bp, Artificial Sequence
  source: /note="Description of Artificial Sequence: Synthetic oligonucleotide"
ccattcacagcaacagacaga

SEQ ID NO: 36038 - DNA, 21 bp, Artificial Sequence
  source: /note="Description of Artificial Sequence: Synthetic oligonucleotide"
ccattcacagacgaactcatg

SEQ ID NO: 36039 - DNA, 21 bp, Artificial Sequence
  source: /note="Description of Artificial Sequence: Synthetic oligonucleotide"
ccattcacaggagcaccacaa

SEQ ID NO: 36040 - DNA, 21 bp, Artificial Sequence
  source: /note="Description of Artificial Sequence: Synthetic oligonucleotide"
ccaggagcaagaagagaactc

SEQ ID NO: 36041 - DNA, 21 bp, Artificial Sequence
  source: /note="Description of Artificial Sequence: Synthetic oligonucleotide"
ccaggagcagtcccaccaagc

SEQ ID NO: 36042 - DNA, 21 bp, Artificial Sequence
  source: /note="Description of Artificial Sequence: Synthetic oligonucleotide"
ccaggatgcagcagcgtcgtc

SEQ ID NO: 36043 - DNA, 21 bp, Artificial Sequence
  source: /note="Description of Artificial Sequence: Synthetic oligonucleotide"
ccaggagacgcaaaaccaaga

SEQ ID NO: 36044 - DNA, 21 bp, Artificial Sequence
  source: /note="Description of Artificial Sequence: Synthetic oligonucleotide"
ccaggagacccaacacacgac

SEQ ID NO: 36045 - DNA, 21 bp, Artificial Sequence
  source: /note="Description of Artificial Sequence: Synthetic oligonucleotide"
ccaggagaagcaacaaaactc

SEQ ID NO: 36046 - DNA, 21 bp, Artificial Sequence
  source: /note="Description of Artificial Sequence: Synthetic oligonucleotide"
ccaggagaaaaactctggtgc

SEQ ID NO: 36047 - DNA, 21 bp, Artificial Sequence
  source: /note="Description of Artificial Sequence: Synthetic oligonucleotide"
ccaggagaaacacaagaagtc

SEQ ID NO: 36048 - DNA, 21 bp, Artificial Sequence
  source: /note="Description of Artificial Sequence: Synthetic oligonucleotide"
ccaggattcgacccaagcgga

SEQ ID NO: 36049 - DNA, 21 bp, Artificial Sequence
  source: /note="Description of Artificial Sequence: Synthetic oligonucleotide"
ccaggaggaagcgaccacagc

SEQ ID NO: 36050 - DNA, 21 bp, Artificial Sequence
  source: /note="Description of Artificial Sequence: Synthetic oligonucleotide"
ccaggaggaagcctcggagaa

SEQ ID NO: 36051 - DNA, 21 bp, Artificial Sequence
  source: /note="Description of Artificial Sequence: Synthetic oligonucleotide"
ccaggacacgacgtcgcaaga

SEQ ID NO: 36052 - DNA, 21 bp, Artificial Sequence
  source: /note="Description of Artificial Sequence: Synthetic oligonucleotide"
ccaggacacatgccagcaagc

SEQ ID NO: 36053 - DNA, 21 bp, Artificial Sequence
  source: /note="Description of Artificial Sequence: Synthetic oligonucleotide"
ccaggaatcgacgcaagaatc

SEQ ID NO: 36054 - DNA, 21 bp, Artificial Sequence
  source: /note="Description of Artificial Sequence: Synthetic oligonucleotide"
ccaggaatcgacagaaaaagc

SEQ ID NO: 36055 - DNA, 21 bp, Artificial Sequence
  source: /note="Description of Artificial Sequence: Synthetic oligonucleotide"
ccaggaatccaagcaccaatc

SEQ ID NO: 36056 - DNA, 21 bp, Artificial Sequence
  source: /note="Description of Artificial Sequence: Synthetic oligonucleotide"
ccaggaaaaatccacgcagca

SEQ ID NO: 36057 - DNA, 21 bp, Artificial Sequence
  source: /note="Description of Artificial Sequence: Synthetic oligonucleotide"
ccaggaaaactcctcaaccca

SEQ ID NO: 36058 - DNA, 21 bp, Artificial Sequence
  source: /note="Description of Artificial Sequence: Synthetic oligonucleotide"
ccaggaaaaagcctcgaagca

SEQ ID NO: 36059 - DNA, 21 bp, Artificial Sequence
  source: /note="Description of Artificial Sequence: Synthetic oligonucleotide"
ccaggaaaatacagcccaagc

SEQ ID NO: 36060 - DNA, 21 bp, Artificial Sequence
  source: /note="Description of Artificial Sequence: Synthetic oligonucleotide"
ccaggactcgcagactacgga

SEQ ID NO: 36061 - DNA, 21 bp, Artificial Sequence
  source: /note="Description of Artificial Sequence: Synthetic oligonucleotide"
ccaggactcctcgaccacgtc

SEQ ID NO: 36062 - DNA, 21 bp, Artificial Sequence
  source: /note="Description of Artificial Sequence: Synthetic oligonucleotide"
ccaggactccaaagcatgaaa

SEQ ID NO: 36063 - DNA, 21 bp, Artificial Sequence
  source: /note="Description of Artificial Sequence: Synthetic oligonucleotide"
ccaggactcagaagcgacagc

SEQ ID NO: 36064 - DNA, 21 bp, Artificial Sequence
  source: /note="Description of Artificial Sequence: Synthetic oligonucleotide"
ccaggactcacagcaaaccca

SEQ ID NO: 36065 - DNA, 21 bp, Artificial Sequence
  source: /note="Description of Artificial Sequence: Synthetic oligonucleotide"
ccaggactcacaaaagcaatc

SEQ ID NO: 36066 - DNA, 21 bp, Artificial Sequence
  source: /note="Description of Artificial Sequence: Synthetic oligonucleotide"
ccaggaatgagaatgggacaa

SEQ ID NO: 36067 - DNA, 21 bp, Artificial Sequence
  source: /note="Description of Artificial Sequence: Synthetic oligonucleotide"
ccaggaaaccacgtcacaaga

SEQ ID NO: 36068 - DNA, 21 bp, Artificial Sequence
  source: /note="Description of Artificial Sequence: Synthetic oligonucleotide"
ccaggaaactacgaatacaga

SEQ ID NO: 36069 - DNA, 21 bp, Artificial Sequence
  source: /note="Description of Artificial Sequence: Synthetic oligonucleotide"
ccaggaccaggacaaccaaga

SEQ ID NO: 36070 - DNA, 21 bp, Artificial Sequence
  source: /note="Description of Artificial Sequence: Synthetic oligonucleotide"
ccaggaccaatgaacagcagc

SEQ ID NO: 36071 - DNA, 21 bp, Artificial Sequence
  source: /note="Description of Artificial Sequence: Synthetic oligonucleotide"
ccaggaccaagaagagacatc

SEQ ID NO: 36072 - DNA, 21 bp, Artificial Sequence
  source: /note="Description of Artificial Sequence: Synthetic oligonucleotide"
ccaggaccaacaggagcatac

SEQ ID NO: 36073 - DNA, 21 bp, Artificial Sequence
  source: /note="Description of Artificial Sequence: Synthetic oligonucleotide"
ccaggacaagaaacaagctac

SEQ ID NO: 36074 - DNA, 21 bp, Artificial Sequence
  source: /note="Description of Artificial Sequence: Synthetic oligonucleotide"
ccaggacaacaaaaaaacatg

SEQ ID NO: 36075 - DNA, 21 bp, Artificial Sequence
  source: /note="Description of Artificial Sequence: Synthetic oligonucleotide"
ccaggacaaagaggaacacca

SEQ ID NO: 36076 - DNA, 21 bp, Artificial Sequence
  source: /note="Description of Artificial Sequence: Synthetic oligonucleotide"
ccaggacaaacacaacacaac

SEQ ID NO: 36077 - DNA, 21 bp, Artificial Sequence
  source: /note="Description of Artificial Sequence: Synthetic oligonucleotide"
ccaggaagagacgcagaagga

SEQ ID NO: 36078 - DNA, 21 bp, Artificial Sequence
  source: /note="Description of Artificial Sequence: Synthetic oligonucleotide"
ccaggaagagaaggagtcaca

SEQ ID NO: 36079 - DNA, 21 bp, Artificial Sequence
  source: /note="Description of Artificial Sequence: Synthetic oligonucleotide"
ccaggaagaccacaaccaagc

SEQ ID NO: 36080 - DNA, 21 bp, Artificial Sequence
  source: /note="Description of Artificial Sequence: Synthetic oligonucleotide"
ccaggaagagtcggaccactc

SEQ ID NO: 36081 - DNA, 21 bp, Artificial Sequence
  source: /note="Description of Artificial Sequence: Synthetic oligonucleotide"
ccaggaagcttcccaagagga

SEQ ID NO: 36082 - DNA, 21 bp, Artificial Sequence
  source: /note="Description of Artificial Sequence: Synthetic oligonucleotide"
ccaggaagcaacagcggacac

SEQ ID NO: 36083 - DNA, 21 bp, Artificial Sequence
  source: /note="Description of Artificial Sequence: Synthetic oligonucleotide"
ccaggaagccaagcagtccac

SEQ ID NO: 36084 - DNA, 21 bp, Artificial Sequence
  source: /note="Description of Artificial Sequence: Synthetic oligonucleotide"
ccaggaagccaaagaaacagc

SEQ ID NO: 36085 - DNA, 21 bp, Artificial Sequence
  source: /note="Description of Artificial Sequence: Synthetic oligonucleotide"
ccaggaagcagagcaccagga

SEQ ID NO: 36086 - DNA, 21 bp, Artificial Sequence
  source: /note="Description of Artificial Sequence: Synthetic oligonucleotide"
ccaggaacagcaagaacaaac

SEQ ID NO: 36087 - DNA, 21 bp, Artificial Sequence
  source: /note="Description of Artificial Sequence: Synthetic oligonucleotide"
ccaggaacaggaagatacgtc

SEQ ID NO: 36088 - DNA, 21 bp, Artificial Sequence
  source: /note="Description of Artificial Sequence: Synthetic oligonucleotide"
ccaggaacaccactccaaagc

SEQ ID NO: 36089 - DNA, 21 bp, Artificial Sequence
  source: /note="Description of Artificial Sequence: Synthetic oligonucleotide"
ccaggaacaagcagcacagga

SEQ ID NO: 36090 - DNA, 21 bp, Artificial Sequence
  source: /note="Description of Artificial Sequence: Synthetic oligonucleotide"
ccaggagtcaacccagcaatc

SEQ ID NO: 36091 - DNA, 21 bp, Artificial Sequence
  source: /note="Description of Artificial Sequence: Synthetic oligonucleotide"
ccaggagtcagaggaagccca

SEQ ID NO: 36092 - DNA, 21 bp, Artificial Sequence
  source: /note="Description of Artificial Sequence: Synthetic oligonucleotide"
ccaggagtcacagacagagga

SEQ ID NO: 36093 - DNA, 21 bp, Artificial Sequence
  source: /note="Description of Artificial Sequence: Synthetic oligonucleotide"
ccaggatacccagcagtcaca

SEQ ID NO: 36094 - DNA, 21 bp, Artificial Sequence
  source: /note="Description of Artificial Sequence: Synthetic oligonucleotide"
ccacacgcaaacagcagcctc

SEQ ID NO: 36095 - DNA, 21 bp, Artificial Sequence
  source: /note="Description of Artificial Sequence: Synthetic oligonucleotide"
ccacacgacagcccaacacca

SEQ ID NO: 36096 - DNA, 21 bp, Artificial Sequence
  source: /note="Description of Artificial Sequence: Synthetic oligonucleotide"
ccacacggagtcggagacgca

SEQ ID NO: 36097 - DNA, 21 bp, Artificial Sequence
  source: /note="Description of Artificial Sequence: Synthetic oligonucleotide"
ccacaccacgacgacgaaaac

SEQ ID NO: 36098 - DNA, 21 bp, Artificial Sequence
  source: /note="Description of Artificial Sequence: Synthetic oligonucleotide"
ccacacctcgaatgcggaatg

SEQ ID NO: 36099 - DNA, 21 bp, Artificial Sequence
  source: /note="Description of Artificial Sequence: Synthetic oligonucleotide"
ccacacctcggagtcagcaca

SEQ ID NO: 36100 - DNA, 21 bp, Artificial Sequence
  source: /note="Description of Artificial Sequence: Synthetic oligonucleotide"
ccacacctccacaacggactc

SEQ ID NO: 36101 - DNA, 21 bp, Artificial Sequence
  source: /note="Description of Artificial Sequence: Synthetic oligonucleotide"
ccacacctcaaaatcgcagca

SEQ ID NO: 36102 - DNA, 21 bp, Artificial Sequence
  source: /note="Description of Artificial Sequence: Synthetic oligonucleotide"
ccacacctcccagaccacgca

SEQ ID NO: 36103 - DNA, 21 bp, Artificial Sequence
  source: /note="Description of Artificial Sequence: Synthetic oligonucleotide"
ccacacctcccaccagcaaac

SEQ ID NO: 36104 - DNA, 21 bp, Artificial Sequence
  source: /note="Description of Artificial Sequence: Synthetic oligonucleotide"
ccacacctcccacaaaacatg

SEQ ID NO: 36105 - DNA, 21 bp, Artificial Sequence
  source: /note="Description of Artificial Sequence: Synthetic oligonucleotide"
ccacacctcagcgcaaacgca

SEQ ID NO: 36106 - DNA, 21 bp, Artificial Sequence
  source: /note="Description of Artificial Sequence: Synthetic oligonucleotide"
ccacacatgggaagagcagac

SEQ ID NO: 36107 - DNA, 21 bp, Artificial Sequence
  source: /note="Description of Artificial Sequence: Synthetic oligonucleotide"
ccacacaacagcacagacaca

SEQ ID NO: 36108 - DNA, 21 bp, Artificial Sequence
  source: /note="Description of Artificial Sequence: Synthetic oligonucleotide"
ccacacccaaacagcagccca

SEQ ID NO: 36109 - DNA, 21 bp, Artificial Sequence
  source: /note="Description of Artificial Sequence: Synthetic oligonucleotide"
ccacacccaccagaacaaagc

SEQ ID NO: 36110 - DNA, 21 bp, Artificial Sequence
  source: /note="Description of Artificial Sequence: Synthetic oligonucleotide"
ccacacccaccaagcaacaga

SEQ ID NO: 36111 - DNA, 21 bp, Artificial Sequence
  source: /note="Description of Artificial Sequence: Synthetic oligonucleotide"
ccacacccaagcgcacaagga

SEQ ID NO: 36112 - DNA, 21 bp, Artificial Sequence
  source: /note="Description of Artificial Sequence: Synthetic oligonucleotide"
ccacacccaagcagcatccca

SEQ ID NO: 36113 - DNA, 21 bp, Artificial Sequence
  source: /note="Description of Artificial Sequence: Synthetic oligonucleotide"
ccacaccaaagcatcccacca

SEQ ID NO: 36114 - DNA, 21 bp, Artificial Sequence
  source: /note="Description of Artificial Sequence: Synthetic oligonucleotide"
ccacacagagaatacgtcgtc

SEQ ID NO: 36115 - DNA, 21 bp, Artificial Sequence
  source: /note="Description of Artificial Sequence: Synthetic oligonucleotide"
ccacacagaccaagcaacagc

SEQ ID NO: 36116 - DNA, 21 bp, Artificial Sequence
  source: /note="Description of Artificial Sequence: Synthetic oligonucleotide"
ccacacagaccaacagtcgtc

SEQ ID NO: 36117 - DNA, 21 bp, Artificial Sequence
  source: /note="Description of Artificial Sequence: Synthetic oligonucleotide"
ccacacagagtcagcgtcagc

SEQ ID NO: 36118 - DNA, 21 bp, Artificial Sequence
  source: /note="Description of Artificial Sequence: Synthetic oligonucleotide"
ccacacagcaacatgaacagc

SEQ ID NO: 36119 - DNA, 21 bp, Artificial Sequence
  source: /note="Description of Artificial Sequence: Synthetic oligonucleotide"
ccacacagcagcaaagaaatg

SEQ ID NO: 36120 - DNA, 21 bp, Artificial Sequence
  source: /note="Description of Artificial Sequence: Synthetic oligonucleotide"
ccacacagcagcatgctcctc

SEQ ID NO: 36121 - DNA, 21 bp, Artificial Sequence
  source: /note="Description of Artificial Sequence: Synthetic oligonucleotide"
ccacacacaggatacacagac

SEQ ID NO: 36122 - DNA, 21 bp, Artificial Sequence
  source: /note="Description of Artificial Sequence: Synthetic oligonucleotide"
ccacacacactcgtcacaaga

SEQ ID NO: 36123 - DNA, 21 bp, Artificial Sequence
  source: /note="Description of Artificial Sequence: Synthetic oligonucleotide"
ccacacacaagcccaccaagc

SEQ ID NO: 36124 - DNA, 21 bp, Artificial Sequence
  source: /note="Description of Artificial Sequence: Synthetic oligonucleotide"
ccaatcgcaagagaatacgga

SEQ ID NO: 36125 - DNA, 21 bp, Artificial Sequence
  source: /note="Description of Artificial Sequence: Synthetic oligonucleotide"
ccaatcgcaagaggagacttc

SEQ ID NO: 36126 - DNA, 21 bp, Artificial Sequence
  source: /note="Description of Artificial Sequence: Synthetic oligonucleotide"
ccaatcgacagagaatacgca

SEQ ID NO: 36127 - DNA, 21 bp, Artificial Sequence
  source: /note="Description of Artificial Sequence: Synthetic oligonucleotide"
ccaatcgacacaggaagagaa

SEQ ID NO: 36128 - DNA, 21 bp, Artificial Sequence
  source: /note="Description of Artificial Sequence: Synthetic oligonucleotide"
ccaatcgactacggagtcgaa

SEQ ID NO: 36129 - DNA, 21 bp, Artificial Sequence
  source: /note="Description of Artificial Sequence: Synthetic oligonucleotide"
ccaatcgaaggaagaagagtc

SEQ ID NO: 36130 - DNA, 21 bp, Artificial Sequence
  source: /note="Description of Artificial Sequence: Synthetic oligonucleotide"
ccaatcgaaagaacactccca

SEQ ID NO: 36131 - DNA, 21 bp, Artificial Sequence
  source: /note="Description of Artificial Sequence: Synthetic oligonucleotide"
ccaatcggaccaccaaacagc

SEQ ID NO: 36132 - DNA, 21 bp, Artificial Sequence
  source: /note="Description of Artificial Sequence: Synthetic oligonucleotide"
ccaatcggaagcatgctcagc

SEQ ID NO: 36133 - DNA, 21 bp, Artificial Sequence
  source: /note="Description of Artificial Sequence: Synthetic oligonucleotide"
ccaatcggaagcaacggaaaa

SEQ ID NO: 36134 - DNA, 21 bp, Artificial Sequence
  source: /note="Description of Artificial Sequence: Synthetic oligonucleotide"
ccaatcggagtccaagaaaaa

SEQ ID NO: 36135 - DNA, 21 bp, Artificial Sequence
  source: /note="Description of Artificial Sequence: Synthetic oligonucleotide"
ccaatccacatcagcagcgtc

SEQ ID NO: 36136 - DNA, 21 bp, Artificial Sequence
  source: /note="Description of Artificial Sequence: Synthetic oligonucleotide"
ccaatccactacagccaagac

SEQ ID NO: 36137 - DNA, 21 bp, Artificial Sequence
  source: /note="Description of Artificial Sequence: Synthetic oligonucleotide"
ccaatcatgggacaaaaaagc

SEQ ID NO: 36138 - DNA, 21 bp, Artificial Sequence
  source: /note="Description of Artificial Sequence: Synthetic oligonucleotide"
ccaatcaacgacagcagcagc

SEQ ID NO: 36139 - DNA, 21 bp, Artificial Sequence
  source: /note="Description of Artificial Sequence: Synthetic oligonucleotide"
ccaatcaacatgagaggacca

SEQ ID NO: 36140 - DNA, 21 bp, Artificial Sequence
  source: /note="Description of Artificial Sequence: Synthetic oligonucleotide"
ccaatcccagacaaaagcagc

SEQ ID NO: 36141 - DNA, 21 bp, Artificial Sequence
  source: /note="Description of Artificial Sequence: Synthetic oligonucleotide"
ccaatcccaggaccaggaaaa

SEQ ID NO: 36142 - DNA, 21 bp, Artificial Sequence
  source: /note="Description of Artificial Sequence: Synthetic oligonucleotide"
ccaatcccaaacaaaggagga

SEQ ID NO: 36143 - DNA, 21 bp, Artificial Sequence
  source: /note="Description of Artificial Sequence: Synthetic oligonucleotide"
ccaatccaaacaagaacatac

SEQ ID NO: 36144 - DNA, 21 bp, Artificial Sequence
  source: /note="Description of Artificial Sequence: Synthetic oligonucleotide"
ccaatcagagcagcagcaagc

SEQ ID NO: 36145 - DNA, 21 bp, Artificial Sequence
  source: /note="Description of Artificial Sequence: Synthetic oligonucleotide"
ccaatcagagcagaagcagtc

SEQ ID NO: 36146 - DNA, 21 bp, Artificial Sequence
  source: /note="Description of Artificial Sequence: Synthetic oligonucleotide"
ccaatcagcgaattcaacgca

SEQ ID NO: 36147 - DNA, 21 bp, Artificial Sequence
  source: /note="Description of Artificial Sequence: Synthetic oligonucleotide"
ccaatcagcctcagcatgcca

SEQ ID NO: 36148 - DNA, 21 bp, Artificial Sequence
  source: /note="Description of Artificial Sequence: Synthetic oligonucleotide"
ccaatcagcccactcagctac

SEQ ID NO: 36149 - DNA, 21 bp, Artificial Sequence
  source: /note="Description of Artificial Sequence: Synthetic oligonucleotide"
ccaatcagccaaggaagactc

SEQ ID NO: 36150 - DNA, 21 bp, Artificial Sequence
  source: /note="Description of Artificial Sequence: Synthetic oligonucleotide"
ccaatcagcagcaaaagcagc

SEQ ID NO: 36151 - DNA, 21 bp, Artificial Sequence
  source: /note="Description of Artificial Sequence: Synthetic oligonucleotide"
ccaatcagcacactcctcgca

SEQ ID NO: 36152 - DNA, 21 bp, Artificial Sequence
  source: /note="Description of Artificial Sequence: Synthetic oligonucleotide"
ccaatcacaaacccaagaatc

SEQ ID NO: 36153 - DNA, 21 bp, Artificial Sequence
  source: /note="Description of Artificial Sequence: Synthetic oligonucleotide"
ccaatcacaaacagcaacatc

SEQ ID NO: 36154 - DNA, 21 bp, Artificial Sequence
  source: /note="Description of Artificial Sequence: Synthetic oligonucleotide"
ccaatcacaaactacagcagc

SEQ ID NO: 36155 - DNA, 21 bp, Artificial Sequence
  source: /note="Description of Artificial Sequence: Synthetic oligonucleotide"
ccaatcacaccaggaaacgaa

SEQ ID NO: 36156 - DNA, 21 bp, Artificial Sequence
  source: /note="Description of Artificial Sequence: Synthetic oligonucleotide"
ccaatcacaacagtcccagca

SEQ ID NO: 36157 - DNA, 21 bp, Artificial Sequence
  source: /note="Description of Artificial Sequence: Synthetic oligonucleotide"
ccaatcgtcggaagccacgaa

SEQ ID NO: 36158 - DNA, 21 bp, Artificial Sequence
  source: /note="Description of Artificial Sequence: Synthetic oligonucleotide"
ccaatcgtcccagtcagcgca

SEQ ID NO: 36159 - DNA, 21 bp, Artificial Sequence
  source: /note="Description of Artificial Sequence: Synthetic oligonucleotide"
ccaatcgtcacacacgcactc

SEQ ID NO: 36160 - DNA, 21 bp, Artificial Sequence
  source: /note="Description of Artificial Sequence: Synthetic oligonucleotide"
ccaatctacaaaggaacagga

SEQ ID NO: 36161 - DNA, 21 bp, Artificial Sequence
  source: /note="Description of Artificial Sequence: Synthetic oligonucleotide"
ccaaaagcagcaccaaacttc

SEQ ID NO: 36162 - DNA, 21 bp, Artificial Sequence
  source: /note="Description of Artificial Sequence: Synthetic oligonucleotide"
ccaaaagcaatcctcccaagc

SEQ ID NO: 36163 - DNA, 21 bp, Artificial Sequence
  source: /note="Description of Artificial Sequence: Synthetic oligonucleotide"
ccaaaagcaagcgactggcac

SEQ ID NO: 36164 - DNA, 21 bp, Artificial Sequence
  source: /note="Description of Artificial Sequence: Synthetic oligonucleotide"
ccaaaagacgacggacaaaac

SEQ ID NO: 36165 - DNA, 21 bp, Artificial Sequence
  source: /note="Description of Artificial Sequence: Synthetic oligonucleotide"
ccaaaagacatcagagaattc

SEQ ID NO: 36166 - DNA, 21 bp, Artificial Sequence
  source: /note="Description of Artificial Sequence: Synthetic oligonucleotide"
ccaaaagacagaaacccagtc

SEQ ID NO: 36167 - DNA, 21 bp, Artificial Sequence
  source: /note="Description of Artificial Sequence: Synthetic oligonucleotide"
ccaaaagacagcagcagaaca

SEQ ID NO: 36168 - DNA, 21 bp, Artificial Sequence
  source: /note="Description of Artificial Sequence: Synthetic oligonucleotide"
ccaaaagaaagaacacacctc

SEQ ID NO: 36169 - DNA, 21 bp, Artificial Sequence
  source: /note="Description of Artificial Sequence: Synthetic oligonucleotide"
ccaaaattcggaggagtcagc

SEQ ID NO: 36170 - DNA, 21 bp, Artificial Sequence
  source: /note="Description of Artificial Sequence: Synthetic oligonucleotide"
ccaaaaggagcagcaacaatg

SEQ ID NO: 36171 - DNA, 21 bp, Artificial Sequence
  source: /note="Description of Artificial Sequence: Synthetic oligonucleotide"
ccaaaaggagaaacaggaaga

SEQ ID NO: 36172 - DNA, 21 bp, Artificial Sequence
  source: /note="Description of Artificial Sequence: Synthetic oligonucleotide"
ccaaaaggaacacacttcgga

SEQ ID NO: 36173 - DNA, 21 bp, Artificial Sequence
  source: /note="Description of Artificial Sequence: Synthetic oligonucleotide"
ccaaaaggatacggagcaagc

SEQ ID NO: 36174 - DNA, 21 bp, Artificial Sequence
  source: /note="Description of Artificial Sequence: Synthetic oligonucleotide"
ccaaaaatcagcacactcgga

SEQ ID NO: 36175 - DNA, 21 bp, Artificial Sequence
  source: /note="Description of Artificial Sequence: Synthetic oligonucleotide"
ccaaaaaaagacccagtccca

SEQ ID NO: 36176 - DNA, 21 bp, Artificial Sequence
  source: /note="Description of Artificial Sequence: Synthetic oligonucleotide"
ccaaaactcaaagacgtcaca

SEQ ID NO: 36177 - DNA, 21 bp, Artificial Sequence
  source: /note="Description of Artificial Sequence: Synthetic oligonucleotide"
ccaaaactcagcagcagcaca

SEQ ID NO: 36178 - DNA, 21 bp, Artificial Sequence
  source: /note="Description of Artificial Sequence: Synthetic oligonucleotide"
ccaaaactctacgacatgatg

SEQ ID NO: 36179 - DNA, 21 bp, Artificial Sequence
  source: /note="Description of Artificial Sequence: Synthetic oligonucleotide"
ccaaaaatggacgacaaaaac

SEQ ID NO: 36180 - DNA, 21 bp, Artificial Sequence
  source: /note="Description of Artificial Sequence: Synthetic oligonucleotide"
ccaaaaatgctcgtcacagga

SEQ ID NO: 36181 - DNA, 21 bp, Artificial Sequence
  source: /note="Description of Artificial Sequence: Synthetic oligonucleotide"
ccaaaaatgacaggagcaaga

SEQ ID NO: 36182 - DNA, 21 bp, Artificial Sequence
  source: /note="Description of Artificial Sequence: Synthetic oligonucleotide"
ccaaaaaacatggtcccacca

SEQ ID NO: 36183 - DNA, 21 bp, Artificial Sequence
  source: /note="Description of Artificial Sequence: Synthetic oligonucleotide"
ccaaaaccagaattcgcaagc

SEQ ID NO: 36184 - DNA, 21 bp, Artificial Sequence
  source: /note="Description of Artificial Sequence: Synthetic oligonucleotide"
ccaaaaccagaattcctcgca

SEQ ID NO: 36185 - DNA, 21 bp, Artificial Sequence
  source: /note="Description of Artificial Sequence: Synthetic oligonucleotide"
ccaaaaccagaaccacacgca

SEQ ID NO: 36186 - DNA, 21 bp, Artificial Sequence
  source: /note="Description of Artificial Sequence: Synthetic oligonucleotide"
ccaaaaccaatcacagtcaca

SEQ ID NO: 36187 - DNA, 21 bp, Artificial Sequence
  source: /note="Description of Artificial Sequence: Synthetic oligonucleotide"
ccaaaaccaccaaacctcctc

SEQ ID NO: 36188 - DNA, 21 bp, Artificial Sequence
  source: /note="Description of Artificial Sequence: Synthetic oligonucleotide"
ccaaaaccaccaagcctcgga

SEQ ID NO: 36189 - DNA, 21 bp, Artificial Sequence
  source: /note="Description of Artificial Sequence: Synthetic oligonucleotide"
ccaaaacaagaaagctacgca

SEQ ID NO: 36190 - DNA, 21 bp, Artificial Sequence
  source: /note="Description of Artificial Sequence: Synthetic oligonucleotide"
ccaaaaagcatggacggatac

SEQ ID NO: 36191 - DNA, 21 bp, Artificial Sequence
  source: /note="Description of Artificial Sequence: Synthetic oligonucleotide"
ccaaaaagcaactactaccca

SEQ ID NO: 36192 - DNA, 21 bp, Artificial Sequence
  source: /note="Description of Artificial Sequence: Synthetic oligonucleotide"
ccaaaaacacacgtcctcagc

SEQ ID NO: 36193 - DNA, 21 bp, Artificial Sequence
  source: /note="Description of Artificial Sequence: Synthetic oligonucleotide"
ccaaaaacatacgaaacagtc

SEQ ID NO: 36194 - DNA, 21 bp, Artificial Sequence
  source: /note="Description of Artificial Sequence: Synthetic oligonucleotide"
ccactcgcagcaggaagcgtc

SEQ ID NO: 36195 - DNA, 21 bp, Artificial Sequence
  source: /note="Description of Artificial Sequence: Synthetic oligonucleotide"
ccactcgcaggaccactcaca

SEQ ID NO: 36196 - DNA, 21 bp, Artificial Sequence
  source: /note="Description of Artificial Sequence: Synthetic oligonucleotide"
ccactcgcacacacaacaagc

SEQ ID NO: 36197 - DNA, 21 bp, Artificial Sequence
  source: /note="Description of Artificial Sequence: Synthetic oligonucleotide"
ccactcgcaagagaagaactc

SEQ ID NO: 36198 - DNA, 21 bp, Artificial Sequence
  source: /note="Description of Artificial Sequence: Synthetic oligonucleotide"
ccactcgcaagcccaatccca

SEQ ID NO: 36199 - DNA, 21 bp, Artificial Sequence
  source: /note="Description of Artificial Sequence: Synthetic oligonucleotide"
ccactcgcaagcacataccca

SEQ ID NO: 36200 - DNA, 21 bp, Artificial Sequence
  source: /note="Description of Artificial Sequence: Synthetic oligonucleotide"
ccactcgacgcaaaaatgtac

SEQ ID NO: 36201 - DNA, 21 bp, Artificial Sequence
  source: /note="Description of Artificial Sequence: Synthetic oligonucleotide"
ccactcgacgacaaaccattc

SEQ ID NO: 36202 - DNA, 21 bp, Artificial Sequence
  source: /note="Description of Artificial Sequence: Synthetic oligonucleotide"
ccactcgacccaggaatcctc

SEQ ID NO: 36203 - DNA, 21 bp, Artificial Sequence
  source: /note="Description of Artificial Sequence: Synthetic oligonucleotide"
ccactcgacagcaacgtcgtc

SEQ ID NO: 36204 - DNA, 21 bp, Artificial Sequence
  source: /note="Description of Artificial Sequence: Synthetic oligonucleotide"
ccactcgacacaagattcagc

SEQ ID NO: 36205 - DNA, 21 bp, Artificial Sequence
  source: /note="Description of Artificial Sequence: Synthetic oligonucleotide"
ccactcgactacagaaaagga

SEQ ID NO: 36206 - DNA, 21 bp, Artificial Sequence
  source: /note="Description of Artificial Sequence: Synthetic oligonucleotide"
ccactcgaaaaaagcagcttc

SEQ ID NO: 36207 - DNA, 21 bp, Artificial Sequence
  source: /note="Description of Artificial Sequence: Synthetic oligonucleotide"
ccactcgaaagcgtcgacatc

SEQ ID NO: 36208 - DNA, 21 bp, Artificial Sequence
  source: /note="Description of Artificial Sequence: Synthetic oligonucleotide"
ccactcttcaacggaagcgca

SEQ ID NO: 36209 - DNA, 21 bp, Artificial Sequence
  source: /note="Description of Artificial Sequence: Synthetic oligonucleotide"
ccactcggagcaggaaaaagc

SEQ ID NO: 36210 - DNA, 21 bp, Artificial Sequence
  source: /note="Description of Artificial Sequence: Synthetic oligonucleotide"
ccactcggagcacaacacctc

SEQ ID NO: 36211 - DNA, 21 bp, Artificial Sequence
  source: /note="Description of Artificial Sequence: Synthetic oligonucleotide"
ccactcggagacgcatgggga

SEQ ID NO: 36212 - DNA, 21 bp, Artificial Sequence
  source: /note="Description of Artificial Sequence: Synthetic oligonucleotide"
ccactcggaatggtccacaca

SEQ ID NO: 36213 - DNA, 21 bp, Artificial Sequence
  source: /note="Description of Artificial Sequence: Synthetic oligonucleotide"
ccactccacatgacaacaatg

SEQ ID NO: 36214 - DNA, 21 bp, Artificial Sequence
  source: /note="Description of Artificial Sequence: Synthetic oligonucleotide"
ccactccacaacagagtccca

SEQ ID NO: 36215 - DNA, 21 bp, Artificial Sequence
  source: /note="Description of Artificial Sequence: Synthetic oligonucleotide"
ccactccacagagcaaacaca

SEQ ID NO: 36216 - DNA, 21 bp, Artificial Sequence
  source: /note="Description of Artificial Sequence: Synthetic oligonucleotide"
ccactccacagaacactcgac

SEQ ID NO: 36217 - DNA, 21 bp, Artificial Sequence
  source: /note="Description of Artificial Sequence: Synthetic oligonucleotide"
ccactcatcgcagtcccaaca

SEQ ID NO: 36218 - DNA, 21 bp, Artificial Sequence
  source: /note="Description of Artificial Sequence: Synthetic oligonucleotide"
ccactcatcggaaaaccaaac

SEQ ID NO: 36219 - DNA, 21 bp, Artificial Sequence
  source: /note="Description of Artificial Sequence: Synthetic oligonucleotide"
ccactcatcacaccagacctc

SEQ ID NO: 36220 - DNA, 21 bp, Artificial Sequence
  source: /note="Description of Artificial Sequence: Synthetic oligonucleotide"
ccactcaaagcacacatgatg

SEQ ID NO: 36221 - DNA, 21 bp, Artificial Sequence
  source: /note="Description of Artificial Sequence: Synthetic oligonucleotide"
ccactcaaagcaagcggaatg

SEQ ID NO: 36222 - DNA, 21 bp, Artificial Sequence
  source: /note="Description of Artificial Sequence: Synthetic oligonucleotide"
ccactcaaactcagctacgga

SEQ ID NO: 36223 - DNA, 21 bp, Artificial Sequence
  source: /note="Description of Artificial Sequence: Synthetic oligonucleotide"
ccactcaaagtcagcgcaagc

SEQ ID NO: 36224 - DNA, 21 bp, Artificial Sequence
  source: /note="Description of Artificial Sequence: Synthetic oligonucleotide"
ccactcctcgacagccacagc

SEQ ID NO: 36225 - DNA, 21 bp, Artificial Sequence
  source: /note="Description of Artificial Sequence: Synthetic oligonucleotide"
ccactcctcgaacacagagga

SEQ ID NO: 36226 - DNA, 21 bp, Artificial Sequence
  source: /note="Description of Artificial Sequence: Synthetic oligonucleotide"
ccactcctccacgacaaaatc

SEQ ID NO: 36227 - DNA, 21 bp, Artificial Sequence
  source: /note="Description of Artificial Sequence: Synthetic oligonucleotide"
ccactcaacgcagcaccattc

SEQ ID NO: 36228 - DNA, 21 bp, Artificial Sequence
  source: /note="Description of Artificial Sequence: Synthetic oligonucleotide"
ccactcaacggagacgcacca

SEQ ID NO: 36229 - DNA, 21 bp, Artificial Sequence
  source: /note="Description of Artificial Sequence: Synthetic oligonucleotide"
ccactcaacccaagcacagga

SEQ ID NO: 36230 - DNA, 21 bp, Artificial Sequence
  source: /note="Description of Artificial Sequence: Synthetic oligonucleotide"
ccactcaacgtcagaacagtc

SEQ ID NO: 36231 - DNA, 21 bp, Artificial Sequence
  source: /note="Description of Artificial Sequence: Synthetic oligonucleotide"
ccactcccagactacctcgtc

SEQ ID NO: 36232 - DNA, 21 bp, Artificial Sequence
  source: /note="Description of Artificial Sequence: Synthetic oligonucleotide"
ccactcccaggaaacgtcgga

SEQ ID NO: 36233 - DNA, 21 bp, Artificial Sequence
  source: /note="Description of Artificial Sequence: Synthetic oligonucleotide"
ccactcccactcagaacagga

SEQ ID NO: 36234 - DNA, 21 bp, Artificial Sequence
  source: /note="Description of Artificial Sequence: Synthetic oligonucleotide"
ccactcccaccaccagaagca

SEQ ID NO: 36235 - DNA, 21 bp, Artificial Sequence
  source: /note="Description of Artificial Sequence: Synthetic oligonucleotide"
ccactcccaagactcgcaagc

SEQ ID NO: 36236 - DNA, 21 bp, Artificial Sequence
  source: /note="Description of Artificial Sequence: Synthetic oligonucleotide"
ccactcccaagcgacggacac

SEQ ID NO: 36237 - DNA, 21 bp, Artificial Sequence
  source: /note="Description of Artificial Sequence: Synthetic oligonucleotide"
ccactcccagtcagcagaagc

SEQ ID NO: 36238 - DNA, 21 bp, Artificial Sequence
  source: /note="Description of Artificial Sequence: Synthetic oligonucleotide"
ccactccaaagccaaacagtc

SEQ ID NO: 36239 - DNA, 21 bp, Artificial Sequence
  source: /note="Description of Artificial Sequence: Synthetic oligonucleotide"
ccactccaaagcagccaattc

SEQ ID NO: 36240 - DNA, 21 bp, Artificial Sequence
  source: /note="Description of Artificial Sequence: Synthetic oligonucleotide"
ccactccaaacaatgacactc

SEQ ID NO: 36241 - DNA, 21 bp, Artificial Sequence
  source: /note="Description of Artificial Sequence: Synthetic oligonucleotide"
ccactccaagtcagactcagc

SEQ ID NO: 36242 - DNA, 21 bp, Artificial Sequence
  source: /note="Description of Artificial Sequence: Synthetic oligonucleotide"
ccactcagagacggactcgtc

SEQ ID NO: 36243 - DNA, 21 bp, Artificial Sequence
  source: /note="Description of Artificial Sequence: Synthetic oligonucleotide"
ccactcagactcacaagcgac

SEQ ID NO: 36244 - DNA, 21 bp, Artificial Sequence
  source: /note="Description of Artificial Sequence: Synthetic oligonucleotide"
ccactcagaccaggacaactc

SEQ ID NO: 36245 - DNA, 21 bp, Artificial Sequence
  source: /note="Description of Artificial Sequence: Synthetic oligonucleotide"
ccactcagagtcagcacacca

SEQ ID NO: 36246 - DNA, 21 bp, Artificial Sequence
  source: /note="Description of Artificial Sequence: Synthetic oligonucleotide"
ccactcagcgcaatcaacagc

SEQ ID NO: 36247 - DNA, 21 bp, Artificial Sequence
  source: /note="Description of Artificial Sequence: Synthetic oligonucleotide"
ccactcagcgacgcaatgagc

SEQ ID NO: 36248 - DNA, 21 bp, Artificial Sequence
  source: /note="Description of Artificial Sequence: Synthetic oligonucleotide"
ccactcagcgacccaaacatc

SEQ ID NO: 36249 - DNA, 21 bp, Artificial Sequence
  source: /note="Description of Artificial Sequence: Synthetic oligonucleotide"
ccactcagcgaagacaaaaga

SEQ ID NO: 36250 - DNA, 21 bp, Artificial Sequence
  source: /note="Description of Artificial Sequence: Synthetic oligonucleotide"
ccactcagcttcacagtcgca

SEQ ID NO: 36251 - DNA, 21 bp, Artificial Sequence
  source: /note="Description of Artificial Sequence: Synthetic oligonucleotide"
ccactcagcatgatggaacca

SEQ ID NO: 36252 - DNA, 21 bp, Artificial Sequence
  source: /note="Description of Artificial Sequence: Synthetic oligonucleotide"
ccactcagcatgagaccagac

SEQ ID NO: 36253 - DNA, 21 bp, Artificial Sequence
  source: /note="Description of Artificial Sequence: Synthetic oligonucleotide"
ccactcagcaacctccaacca

SEQ ID NO: 36254 - DNA, 21 bp, Artificial Sequence
  source: /note="Description of Artificial Sequence: Synthetic oligonucleotide"
ccactcagcccagcaggagca

SEQ ID NO: 36255 - DNA, 21 bp, Artificial Sequence
  source: /note="Description of Artificial Sequence: Synthetic oligonucleotide"
ccactcagcccaatcagaaac

SEQ ID NO: 36256 - DNA, 21 bp, Artificial Sequence
  source: /note="Description of Artificial Sequence: Synthetic oligonucleotide"
ccactcagcccaacatggaaa

SEQ ID NO: 36257 - DNA, 21 bp, Artificial Sequence
  source: /note="Description of Artificial Sequence: Synthetic oligonucleotide"
ccactcagcagaaaccaaatc

SEQ ID NO: 36258 - DNA, 21 bp, Artificial Sequence
  source: /note="Description of Artificial Sequence: Synthetic oligonucleotide"
ccactcagcagcgcagcagga

SEQ ID NO: 36259 - DNA, 21 bp, Artificial Sequence
  source: /note="Description of Artificial Sequence: Synthetic oligonucleotide"
ccactcagcagcggaggaatg

SEQ ID NO: 36260 - DNA, 21 bp, Artificial Sequence
  source: /note="Description of Artificial Sequence: Synthetic oligonucleotide"
ccactcagcagcccagcaaga

SEQ ID NO: 36261 - DNA, 21 bp, Artificial Sequence
  source: /note="Description of Artificial Sequence: Synthetic oligonucleotide"
ccactcagcagcccaaacgga

SEQ ID NO: 36262 - DNA, 21 bp, Artificial Sequence
  source: /note="Description of Artificial Sequence: Synthetic oligonucleotide"
ccactcagcagcacactcgga

SEQ ID NO: 36263 - DNA, 21 bp, Artificial Sequence
  source: /note="Description of Artificial Sequence: Synthetic oligonucleotide"
ccactcagcacaaacagcaca

SEQ ID NO: 36264 - DNA, 21 bp, Artificial Sequence
  source: /note="Description of Artificial Sequence: Synthetic oligonucleotide"
ccactcagctaccaaaaaaac

SEQ ID NO: 36265 - DNA, 21 bp, Artificial Sequence
  source: /note="Description of Artificial Sequence: Synthetic oligonucleotide"
ccactcacagcaggactcgca

SEQ ID NO: 36266 - DNA, 21 bp, Artificial Sequence
  source: /note="Description of Artificial Sequence: Synthetic oligonucleotide"
ccactcacagcacacgtcagc

SEQ ID NO: 36267 - DNA, 21 bp, Artificial Sequence
  source: /note="Description of Artificial Sequence: Synthetic oligonucleotide"
ccactcacacaagcagtccca

SEQ ID NO: 36268 - DNA, 21 bp, Artificial Sequence
  source: /note="Description of Artificial Sequence: Synthetic oligonucleotide"
ccactcacaagcctcaaactc

SEQ ID NO: 36269 - DNA, 21 bp, Artificial Sequence
  source: /note="Description of Artificial Sequence: Synthetic oligonucleotide"
ccactcacaagcgtcgcacca

SEQ ID NO: 36270 - DNA, 21 bp, Artificial Sequence
  source: /note="Description of Artificial Sequence: Synthetic oligonucleotide"
ccactcacaacaagaaaccaa

SEQ ID NO: 36271 - DNA, 21 bp, Artificial Sequence
  source: /note="Description of Artificial Sequence: Synthetic oligonucleotide"
ccactcgtcgcaatcagcaca

SEQ ID NO: 36272 - DNA, 21 bp, Artificial Sequence
  source: /note="Description of Artificial Sequence: Synthetic oligonucleotide"
ccactcgtcctcagcagccac

SEQ ID NO: 36273 - DNA, 21 bp, Artificial Sequence
  source: /note="Description of Artificial Sequence: Synthetic oligonucleotide"
ccactcgtcagaggagacagc

SEQ ID NO: 36274 - DNA, 21 bp, Artificial Sequence
  source: /note="Description of Artificial Sequence: Synthetic oligonucleotide"
ccactcgtcagcacaggaatc

SEQ ID NO: 36275 - DNA, 21 bp, Artificial Sequence
  source: /note="Description of Artificial Sequence: Synthetic oligonucleotide"
ccactcgtcacaatggcaagc

SEQ ID NO: 36276 - DNA, 21 bp, Artificial Sequence
  source: /note="Description of Artificial Sequence: Synthetic oligonucleotide"
ccaatggcaccaccagtccaa

SEQ ID NO: 36277 - DNA, 21 bp, Artificial Sequence
  source: /note="Description of Artificial Sequence: Synthetic oligonucleotide"
ccaatggcacaagtcgcacca

SEQ ID NO: 36278 - DNA, 21 bp, Artificial Sequence
  source: /note="Description of Artificial Sequence: Synthetic oligonucleotide"
ccaatggaaagaacacacatg

SEQ ID NO: 36279 - DNA, 21 bp, Artificial Sequence
  source: /note="Description of Artificial Sequence: Synthetic oligonucleotide"
ccaatgggacaccaaagcgca

SEQ ID NO: 36280 - DNA, 21 bp, Artificial Sequence
  source: /note="Description of Artificial Sequence: Synthetic oligonucleotide"
ccaatgatcaacagcagcatg

SEQ ID NO: 36281 - DNA, 21 bp, Artificial Sequence
  source: /note="Description of Artificial Sequence: Synthetic oligonucleotide"
ccaatgaaagcaagcagccca

SEQ ID NO: 36282 - DNA, 21 bp, Artificial Sequence
  source: /note="Description of Artificial Sequence: Synthetic oligonucleotide"
ccaatgaaaggaagcgtctac

SEQ ID NO: 36283 - DNA, 21 bp, Artificial Sequence
  source: /note="Description of Artificial Sequence: Synthetic oligonucleotide"
ccaatgaaaatgggaccagga

SEQ ID NO: 36284 - DNA, 21 bp, Artificial Sequence
  source: /note="Description of Artificial Sequence: Synthetic oligonucleotide"
ccaatgatgcaaacaccaaaa

SEQ ID NO: 36285 - DNA, 21 bp, Artificial Sequence
  source: /note="Description of Artificial Sequence: Synthetic oligonucleotide"
ccaatgaacagaggaaaagaa

SEQ ID NO: 36286 - DNA, 21 bp, Artificial Sequence
  source: /note="Description of Artificial Sequence: Synthetic oligonucleotide"
ccaatgaacacaaacgtcagc

SEQ ID NO: 36287 - DNA, 21 bp, Artificial Sequence
  source: /note="Description of Artificial Sequence: Synthetic oligonucleotide"
ccaatgccagcaagcgacttc

SEQ ID NO: 36288 - DNA, 21 bp, Artificial Sequence
  source: /note="Description of Artificial Sequence: Synthetic oligonucleotide"
ccaatgccagaattcaacgga

SEQ ID NO: 36289 - DNA, 21 bp, Artificial Sequence
  source: /note="Description of Artificial Sequence: Synthetic oligonucleotide"
ccaatgccagaaatggcagga

SEQ ID NO: 36290 - DNA, 21 bp, Artificial Sequence
  source: /note="Description of Artificial Sequence: Synthetic oligonucleotide"
ccaatgccagtcagagcagtc

SEQ ID NO: 36291 - DNA, 21 bp, Artificial Sequence
  source: /note="Description of Artificial Sequence: Synthetic oligonucleotide"
ccaatgagaggaagcacactc

SEQ ID NO: 36292 - DNA, 21 bp, Artificial Sequence
  source: /note="Description of Artificial Sequence: Synthetic oligonucleotide"
ccaatgagaaaccaagtcgac

SEQ ID NO: 36293 - DNA, 21 bp, Artificial Sequence
  source: /note="Description of Artificial Sequence: Synthetic oligonucleotide"
ccaatgagacaaatcaacgac

SEQ ID NO: 36294 - DNA, 21 bp, Artificial Sequence
  source: /note="Description of Artificial Sequence: Synthetic oligonucleotide"
ccaatgagcgaactcacacca

SEQ ID NO: 36295 - DNA, 21 bp, Artificial Sequence
  source: /note="Description of Artificial Sequence: Synthetic oligonucleotide"
ccaatgagcggaccaagcatg

SEQ ID NO: 36296 - DNA, 21 bp, Artificial Sequence
  source: /note="Description of Artificial Sequence: Synthetic oligonucleotide"
ccaatgagcggaagcaacgca

SEQ ID NO: 36297 - DNA, 21 bp, Artificial Sequence
  source: /note="Description of Artificial Sequence: Synthetic oligonucleotide"
ccaatgagccacatggcacca

SEQ ID NO: 36298 - DNA, 21 bp, Artificial Sequence
  source: /note="Description of Artificial Sequence: Synthetic oligonucleotide"
ccaatgagcctcccactcagc

SEQ ID NO: 36299 - DNA, 21 bp, Artificial Sequence
  source: /note="Description of Artificial Sequence: Synthetic oligonucleotide"
ccaatgagcatgaaagaacca

SEQ ID NO: 36300 - DNA, 21 bp, Artificial Sequence
  source: /note="Description of Artificial Sequence: Synthetic oligonucleotide"
ccaatgagccaaacaccagga

SEQ ID NO: 36301 - DNA, 21 bp, Artificial Sequence
  source: /note="Description of Artificial Sequence: Synthetic oligonucleotide"
ccaatgagccaaacaacaagc

SEQ ID NO: 36302 - DNA, 21 bp, Artificial Sequence
  source: /note="Description of Artificial Sequence: Synthetic oligonucleotide"
ccaatgagcagcccactcaaa

SEQ ID NO: 36303 - DNA, 21 bp, Artificial Sequence
  source: /note="Description of Artificial Sequence: Synthetic oligonucleotide"
ccaatgagcagcagagtcgtc

SEQ ID NO: 36304 - DNA, 21 bp, Artificial Sequence
  source: /note="Description of Artificial Sequence: Synthetic oligonucleotide"
ccaatgagcacaagcacacca

SEQ ID NO: 36305 - DNA, 21 bp, Artificial Sequence
  source: /note="Description of Artificial Sequence: Synthetic oligonucleotide"
ccaatggtcaaaggaacaagc

SEQ ID NO: 36306 - DNA, 21 bp, Artificial Sequence
  source: /note="Description of Artificial Sequence: Synthetic oligonucleotide"
ccaatggtcacagtcagaaca

SEQ ID NO: 36307 - DNA, 21 bp, Artificial Sequence
  source: /note="Description of Artificial Sequence: Synthetic oligonucleotide"
ccaaacgcaaaaacaatccca

SEQ ID NO: 36308 - DNA, 21 bp, Artificial Sequence
  source: /note="Description of Artificial Sequence: Synthetic oligonucleotide"
ccaaacgcacaaacagtctac

SEQ ID NO: 36309 - DNA, 21 bp, Artificial Sequence
  source: /note="Description of Artificial Sequence: Synthetic oligonucleotide"
ccaaacgcaagaatgctcgtc

SEQ ID NO: 36310 - DNA, 21 bp, Artificial Sequence
  source: /note="Description of Artificial Sequence: Synthetic oligonucleotide"
ccaaacgacggagcactccca

SEQ ID NO: 36311 - DNA, 21 bp, Artificial Sequence
  source: /note="Description of Artificial Sequence: Synthetic oligonucleotide"
ccaaacgacagagcagtcgtc

SEQ ID NO: 36312 - DNA, 21 bp, Artificial Sequence
  source: /note="Description of Artificial Sequence: Synthetic oligonucleotide"
ccaaacgacagaacaagaatc

SEQ ID NO: 36313 - DNA, 21 bp, Artificial Sequence
  source: /note="Description of Artificial Sequence: Synthetic oligonucleotide"
ccaaacgaacaagcactcgga

SEQ ID NO: 36314 - DNA, 21 bp, Artificial Sequence
  source: /note="Description of Artificial Sequence: Synthetic oligonucleotide"
ccaaacgaaagcctcgtcaca

SEQ ID NO: 36315 - DNA, 21 bp, Artificial Sequence
  source: /note="Description of Artificial Sequence: Synthetic oligonucleotide"
ccaaacttccacagagcagaa

SEQ ID NO: 36316 - DNA, 21 bp, Artificial Sequence
  source: /note="Description of Artificial Sequence: Synthetic oligonucleotide"
ccaaacggaccatacaacgca

SEQ ID NO: 36317 - DNA, 21 bp, Artificial Sequence
  source: /note="Description of Artificial Sequence: Synthetic oligonucleotide"
ccaaacggaagcgcaaaaagc

SEQ ID NO: 36318 - DNA, 21 bp, Artificial Sequence
  source: /note="Description of Artificial Sequence: Synthetic oligonucleotide"
ccaaaccacgacgtcccacca

SEQ ID NO: 36319 - DNA, 21 bp, Artificial Sequence
  source: /note="Description of Artificial Sequence: Synthetic oligonucleotide"
ccaaaccacaaaggattcgga

SEQ ID NO: 36320 - DNA, 21 bp, Artificial Sequence
  source: /note="Description of Artificial Sequence: Synthetic oligonucleotide"
ccaaaccacaacagcgacaaa

SEQ ID NO: 36321 - DNA, 21 bp, Artificial Sequence
  source: /note="Description of Artificial Sequence: Synthetic oligonucleotide"
ccaaaccacagccaactcctc

SEQ ID NO: 36322 - DNA, 21 bp, Artificial Sequence
  source: /note="Description of Artificial Sequence: Synthetic oligonucleotide"
ccaaacatcaaaaacccaagc

SEQ ID NO: 36323 - DNA, 21 bp, Artificial Sequence
  source: /note="Description of Artificial Sequence: Synthetic oligonucleotide"
ccaaacatcccaatgagagga

SEQ ID NO: 36324 - DNA, 21 bp, Artificial Sequence
  source: /note="Description of Artificial Sequence: Synthetic oligonucleotide"
ccaaacatcacaagcacactc

SEQ ID NO: 36325 - DNA, 21 bp, Artificial Sequence
  source: /note="Description of Artificial Sequence: Synthetic oligonucleotide"
ccaaacctcatcctcggacca

SEQ ID NO: 36326 - DNA, 21 bp, Artificial Sequence
  source: /note="Description of Artificial Sequence: Synthetic oligonucleotide"
ccaaacctccaaagaagccca

SEQ ID NO: 36327 - DNA, 21 bp, Artificial Sequence
  source: /note="Description of Artificial Sequence: Synthetic oligonucleotide"
ccaaacctcagcgacgaaagc

SEQ ID NO: 36328 - DNA, 21 bp, Artificial Sequence
  source: /note="Description of Artificial Sequence: Synthetic oligonucleotide"
ccaaacctcacaatggcaagc

SEQ ID NO: 36329 - DNA, 21 bp, Artificial Sequence
  source: /note="Description of Artificial Sequence: Synthetic oligonucleotide"
ccaaacctcgtcacagcagca

SEQ ID NO: 36330 - DNA, 21 bp, Artificial Sequence
  source: /note="Description of Artificial Sequence: Synthetic oligonucleotide"
ccaaacaacaacgtcccaagc

SEQ ID NO: 36331 - DNA, 21 bp, Artificial Sequence
  source: /note="Description of Artificial Sequence: Synthetic oligonucleotide"
ccaaacaacagagacagcaca

SEQ ID NO: 36332 - DNA, 21 bp, Artificial Sequence
  source: /note="Description of Artificial Sequence: Synthetic oligonucleotide"
ccaaacaacgtcatcagcgaa

SEQ ID NO: 36333 - DNA, 21 bp, Artificial Sequence
  source: /note="Description of Artificial Sequence: Synthetic oligonucleotide"
ccaaacaacgtcccactcgca

SEQ ID NO: 36334 - DNA, 21 bp, Artificial Sequence
  source: /note="Description of Artificial Sequence: Synthetic oligonucleotide"
ccaaacccagcagcagcagca

SEQ ID NO: 36335 - DNA, 21 bp, Artificial Sequence
  source: /note="Description of Artificial Sequence: Synthetic oligonucleotide"
ccaaacccagcaagactcaca

SEQ ID NO: 36336 - DNA, 21 bp, Artificial Sequence
  source: /note="Description of Artificial Sequence: Synthetic oligonucleotide"
ccaaacccaatcttcagcagc

SEQ ID NO: 36337 - DNA, 21 bp, Artificial Sequence
  source: /note="Description of Artificial Sequence: Synthetic oligonucleotide"
ccaaacccaacatggagcagc

SEQ ID NO: 36338 - DNA, 21 bp, Artificial Sequence
  source: /note="Description of Artificial Sequence: Synthetic oligonucleotide"
ccaaacccagtcacaagagga

SEQ ID NO: 36339 - DNA, 21 bp, Artificial Sequence
  source: /note="Description of Artificial Sequence: Synthetic oligonucleotide"
ccaaaccaagacacactcgac

SEQ ID NO: 36340 - DNA, 21 bp, Artificial Sequence
  source: /note="Description of Artificial Sequence: Synthetic oligonucleotide"
ccaaaccaaagcgtcaaacca

SEQ ID NO: 36341 - DNA, 21 bp, Artificial Sequence
  source: /note="Description of Artificial Sequence: Synthetic oligonucleotide"
ccaaacagaggacacccaagc

SEQ ID NO: 36342 - DNA, 21 bp, Artificial Sequence
  source: /note="Description of Artificial Sequence: Synthetic oligonucleotide"
ccaaacagaatcgcaccaatc

SEQ ID NO: 36343 - DNA, 21 bp, Artificial Sequence
  source: /note="Description of Artificial Sequence: Synthetic oligonucleotide"
ccaaacagcggagtcgtcaca

SEQ ID NO: 36344 - DNA, 21 bp, Artificial Sequence
  source: /note="Description of Artificial Sequence: Synthetic oligonucleotide"
ccaaacagcctcaacgcagca

SEQ ID NO: 36345 - DNA, 21 bp, Artificial Sequence
  source: /note="Description of Artificial Sequence: Synthetic oligonucleotide"
ccaaacagcagaacaccatac

SEQ ID NO: 36346 - DNA, 21 bp, Artificial Sequence
  source: /note="Description of Artificial Sequence: Synthetic oligonucleotide"
ccaaacagcagcccaagactc

SEQ ID NO: 36347 - DNA, 21 bp, Artificial Sequence
  source: /note="Description of Artificial Sequence: Synthetic oligonucleotide"
ccaaacagcacaagagtcgtc

SEQ ID NO: 36348 - DNA, 21 bp, Artificial Sequence
  source: /note="Description of Artificial Sequence: Synthetic oligonucleotide"
ccaaacacaatgacaagactc

SEQ ID NO: 36349 - DNA, 21 bp, Artificial Sequence
  source: /note="Description of Artificial Sequence: Synthetic oligonucleotide"
ccaaacgtccacccaaacatc

SEQ ID NO: 36350 - DNA, 21 bp, Artificial Sequence
  source: /note="Description of Artificial Sequence: Synthetic oligonucleotide"
ccaaacgtcaacgtcagcaca

SEQ ID NO: 36351 - DNA, 21 bp, Artificial Sequence
  source: /note="Description of Artificial Sequence: Synthetic oligonucleotide"
ccaaacgtcgtcgacatgagc

SEQ ID NO: 36352 - DNA, 21 bp, Artificial Sequence
  source: /note="Description of Artificial Sequence: Synthetic oligonucleotide"
ccaccagcagacctcagaaca

SEQ ID NO: 36353 - DNA, 21 bp, Artificial Sequence
  source: /note="Description of Artificial Sequence: Synthetic oligonucleotide"
ccaccagcactcagcccagtc

SEQ ID NO: 36354 - DNA, 21 bp, Artificial Sequence
  source: /note="Description of Artificial Sequence: Synthetic oligonucleotide"
ccaccagcaaacagcagcagc

SEQ ID NO: 36355 - DNA, 21 bp, Artificial Sequence
  source: /note="Description of Artificial Sequence: Synthetic oligonucleotide"
ccaccagacgcaagaagcagc

SEQ ID NO: 36356 - DNA, 21 bp, Artificial Sequence
  source: /note="Description of Artificial Sequence: Synthetic oligonucleotide"
ccaccagacggagcaagcaga

SEQ ID NO: 36357 - DNA, 21 bp, Artificial Sequence
  source: /note="Description of Artificial Sequence: Synthetic oligonucleotide"
ccaccagacaaaatgcacagc

SEQ ID NO: 36358 - DNA, 21 bp, Artificial Sequence
  source: /note="Description of Artificial Sequence: Synthetic oligonucleotide"
ccaccagacaacctccacaaa

SEQ ID NO: 36359 - DNA, 21 bp, Artificial Sequence
  source: /note="Description of Artificial Sequence: Synthetic oligonucleotide"
ccaccagaaatgatcctcgga

SEQ ID NO: 36360 - DNA, 21 bp, Artificial Sequence
  source: /note="Description of Artificial Sequence: Synthetic oligonucleotide"
ccaccattcaacaaaagcgac

SEQ ID NO: 36361 - DNA, 21 bp, Artificial Sequence
  source: /note="Description of Artificial Sequence: Synthetic oligonucleotide"
ccaccattcccagaaagactc

SEQ ID NO: 36362 - DNA, 21 bp, Artificial Sequence
  source: /note="Description of Artificial Sequence: Synthetic oligonucleotide"
ccaccaggacacgacgcaagc

SEQ ID NO: 36363 - DNA, 21 bp, Artificial Sequence
  source: /note="Description of Artificial Sequence: Synthetic oligonucleotide"
ccaccaggaatcacaacaagc

SEQ ID NO: 36364 - DNA, 21 bp, Artificial Sequence
  source: /note="Description of Artificial Sequence: Synthetic oligonucleotide"
ccaccaggacaaagcctcaca

SEQ ID NO: 36365 - DNA, 21 bp, Artificial Sequence
  source: /note="Description of Artificial Sequence: Synthetic oligonucleotide"
ccaccaggaagagtcgtcgca

SEQ ID NO: 36366 - DNA, 21 bp, Artificial Sequence
  source: /note="Description of Artificial Sequence: Synthetic oligonucleotide"
ccaccaggaagccacagcagc

SEQ ID NO: 36367 - DNA, 21 bp, Artificial Sequence
  source: /note="Description of Artificial Sequence: Synthetic oligonucleotide"
ccaccaggaagcagcagcaga

SEQ ID NO: 36368 - DNA, 21 bp, Artificial Sequence
  source: /note="Description of Artificial Sequence: Synthetic oligonucleotide"
ccaccaggatacagagcaagc

SEQ ID NO: 36369 - DNA, 21 bp, Artificial Sequence
  source: /note="Description of Artificial Sequence: Synthetic oligonucleotide"
ccaccacaccaacacctcctc

SEQ ID NO: 36370 - DNA, 21 bp, Artificial Sequence
  source: /note="Description of Artificial Sequence: Synthetic oligonucleotide"
ccaccacacagaacattccca

SEQ ID NO: 36371 - DNA, 21 bp, Artificial Sequence
  source: /note="Description of Artificial Sequence: Synthetic oligonucleotide"
ccaccacacacaacattcctc

SEQ ID NO: 36372 - DNA, 21 bp, Artificial Sequence
  source: /note="Description of Artificial Sequence: Synthetic oligonucleotide"
ccaccaatcgacaacagaaca

SEQ ID NO: 36373 - DNA, 21 bp, Artificial Sequence
  source: /note="Description of Artificial Sequence: Synthetic oligonucleotide"
ccaccaaaagcaatgccaaca

SEQ ID NO: 36374 - DNA, 21 bp, Artificial Sequence
  source: /note="Description of Artificial Sequence: Synthetic oligonucleotide"
ccaccactcgaagtcaaacaa

SEQ ID NO: 36375 - DNA, 21 bp, Artificial Sequence
  source: /note="Description of Artificial Sequence: Synthetic oligonucleotide"
ccaccactccacacaggagaa

SEQ ID NO: 36376 - DNA, 21 bp, Artificial Sequence
  source: /note="Description of Artificial Sequence: Synthetic oligonucleotide"
ccaccactcaaaagcccacca

SEQ ID NO: 36377 - DNA, 21 bp, Artificial Sequence
  source: /note="Description of Artificial Sequence: Synthetic oligonucleotide"
ccaccactcccaagcaacgca

SEQ ID NO: 36378 - DNA, 21 bp, Artificial Sequence
  source: /note="Description of Artificial Sequence: Synthetic oligonucleotide"
ccaccaatgcacggaacaaga

SEQ ID NO: 36379 - DNA, 21 bp, Artificial Sequence
  source: /note="Description of Artificial Sequence: Synthetic oligonucleotide"
ccaccaatgagcccacacgtc

SEQ ID NO: 36380 - DNA, 21 bp, Artificial Sequence
  source: /note="Description of Artificial Sequence: Synthetic oligonucleotide"
ccaccaatggtcacaaacaac

SEQ ID NO: 36381 - DNA, 21 bp, Artificial Sequence
  source: /note="Description of Artificial Sequence: Synthetic oligonucleotide"
ccaccaaacaaccacgcagga

SEQ ID NO: 36382 - DNA, 21 bp, Artificial Sequence
  source: /note="Description of Artificial Sequence: Synthetic oligonucleotide"
ccaccaaactacctcaacgca

SEQ ID NO: 36383 - DNA, 21 bp, Artificial Sequence
  source: /note="Description of Artificial Sequence: Synthetic oligonucleotide"
ccaccaccagcagcactcagc

SEQ ID NO: 36384 - DNA, 21 bp, Artificial Sequence
  source: /note="Description of Artificial Sequence: Synthetic oligonucleotide"
ccaccaccaaaaagccaaagc

SEQ ID NO: 36385 - DNA, 21 bp, Artificial Sequence
  source: /note="Description of Artificial Sequence: Synthetic oligonucleotide"
ccaccaccaaacaacaacctc

SEQ ID NO: 36386 - DNA, 21 bp, Artificial Sequence
  source: /note="Description of Artificial Sequence: Synthetic oligonucleotide"
ccaccaccaagagaagtccac

SEQ ID NO: 36387 - DNA, 21 bp, Artificial Sequence
  source: /note="Description of Artificial Sequence: Synthetic oligonucleotide"
ccaccaccaagctgcatggtc

SEQ ID NO: 36388 - DNA, 21 bp, Artificial Sequence
  source: /note="Description of Artificial Sequence: Synthetic oligonucleotide"
ccaccaccaagcagaatggga

SEQ ID NO: 36389 - DNA, 21 bp, Artificial Sequence
  source: /note="Description of Artificial Sequence: Synthetic oligonucleotide"
ccaccacaagaaatgagatac

SEQ ID NO: 36390 - DNA, 21 bp, Artificial Sequence
  source: /note="Description of Artificial Sequence: Synthetic oligonucleotide"
ccaccacaaagcgcagcagtc

SEQ ID NO: 36391 - DNA, 21 bp, Artificial Sequence
  source: /note="Description of Artificial Sequence: Synthetic oligonucleotide"
ccaccacaaagcaacagaaac

SEQ ID NO: 36392 - DNA, 21 bp, Artificial Sequence
  source: /note="Description of Artificial Sequence: Synthetic oligonucleotide"
ccaccaagaatcagcgacgca

SEQ ID NO: 36393 - DNA, 21 bp, Artificial Sequence
  source: /note="Description of Artificial Sequence: Synthetic oligonucleotide"
ccaccaagactcccaagctgc

SEQ ID NO: 36394 - DNA, 21 bp, Artificial Sequence
  source: /note="Description of Artificial Sequence: Synthetic oligonucleotide"
ccaccaagactcgtcagcaca

SEQ ID NO: 36395 - DNA, 21 bp, Artificial Sequence
  source: /note="Description of Artificial Sequence: Synthetic oligonucleotide"
ccaccaagaccaaacggaatc

SEQ ID NO: 36396 - DNA, 21 bp, Artificial Sequence
  source: /note="Description of Artificial Sequence: Synthetic oligonucleotide"
ccaccaagaagaccaatggaa

SEQ ID NO: 36397 - DNA, 21 bp, Artificial Sequence
  source: /note="Description of Artificial Sequence: Synthetic oligonucleotide"
ccaccaagaagcaacgtcgaa

SEQ ID NO: 36398 - DNA, 21 bp, Artificial Sequence
  source: /note="Description of Artificial Sequence: Synthetic oligonucleotide"
ccaccaagaacaccaagcagc

SEQ ID NO: 36399 - DNA, 21 bp, Artificial Sequence
  source: /note="Description of Artificial Sequence: Synthetic oligonucleotide"
ccaccaagagtcagcgcagtc

SEQ ID NO: 36400 - DNA, 21 bp, Artificial Sequence
  source: /note="Description of Artificial Sequence: Synthetic oligonucleotide"
ccaccaagcccaagcgtcaca

SEQ ID NO: 36401 - DNA, 21 bp, Artificial Sequence
  source: /note="Description of Artificial Sequence: Synthetic oligonucleotide"
ccaccaagcccaacatacatg

SEQ ID NO: 36402 - DNA, 21 bp, Artificial Sequence
  source: /note="Description of Artificial Sequence: Synthetic oligonucleotide"
ccaccaagcacagaaatcagc

SEQ ID NO: 36403 - DNA, 21 bp, Artificial Sequence
  source: /note="Description of Artificial Sequence: Synthetic oligonucleotide"
ccaccaagcacaaaactcgtc

SEQ ID NO: 36404 - DNA, 21 bp, Artificial Sequence
  source: /note="Description of Artificial Sequence: Synthetic oligonucleotide"
ccaccaagcacaaacccaaaa

SEQ ID NO: 36405 - DNA, 21 bp, Artificial Sequence
  source: /note="Description of Artificial Sequence: Synthetic oligonucleotide"
ccaccaagcgtcccaagagaa

SEQ ID NO: 36406 - DNA, 21 bp, Artificial Sequence
  source: /note="Description of Artificial Sequence: Synthetic oligonucleotide"
ccaccaacagaaccaagagca

SEQ ID NO: 36407 - DNA, 21 bp, Artificial Sequence
  source: /note="Description of Artificial Sequence: Synthetic oligonucleotide"
ccaccaacaggagcaagcttc

SEQ ID NO: 36408 - DNA, 21 bp, Artificial Sequence
  source: /note="Description of Artificial Sequence: Synthetic oligonucleotide"
ccaccaacaatcacaagcagc

SEQ ID NO: 36409 - DNA, 21 bp, Artificial Sequence
  source: /note="Description of Artificial Sequence: Synthetic oligonucleotide"
ccaccaacaaaagtcgacatg

SEQ ID NO: 36410 - DNA, 21 bp, Artificial Sequence
  source: /note="Description of Artificial Sequence: Synthetic oligonucleotide"
ccaccaacactccaaagcgac

SEQ ID NO: 36411 - DNA, 21 bp, Artificial Sequence
  source: /note="Description of Artificial Sequence: Synthetic oligonucleotide"
ccaccaacaaacccaacagtc

SEQ ID NO: 36412 - DNA, 21 bp, Artificial Sequence
  source: /note="Description of Artificial Sequence: Synthetic oligonucleotide"
ccaccaacaccagcagcacac

SEQ ID NO: 36413 - DNA, 21 bp, Artificial Sequence
  source: /note="Description of Artificial Sequence: Synthetic oligonucleotide"
ccaccaacaccagtcagctgg

SEQ ID NO: 36414 - DNA, 21 bp, Artificial Sequence
  source: /note="Description of Artificial Sequence: Synthetic oligonucleotide"
ccaccaacaagagaaagccca

SEQ ID NO: 36415 - DNA, 21 bp, Artificial Sequence
  source: /note="Description of Artificial Sequence: Synthetic oligonucleotide"
ccaccaacaacaaacctcaac

SEQ ID NO: 36416 - DNA, 21 bp, Artificial Sequence
  source: /note="Description of Artificial Sequence: Synthetic oligonucleotide"
ccaccagtcggaacagtcctc

SEQ ID NO: 36417 - DNA, 21 bp, Artificial Sequence
  source: /note="Description of Artificial Sequence: Synthetic oligonucleotide"
ccaccatacggagcagtcaca

SEQ ID NO: 36418 - DNA, 21 bp, Artificial Sequence
  source: /note="Description of Artificial Sequence: Synthetic oligonucleotide"
ccaccatacacagtcagccca

SEQ ID NO: 36419 - DNA, 21 bp, Artificial Sequence
  source: /note="Description of Artificial Sequence: Synthetic oligonucleotide"
ccacaagcaagacaaccattc

SEQ ID NO: 36420 - DNA, 21 bp, Artificial Sequence
  source: /note="Description of Artificial Sequence: Synthetic oligonucleotide"
ccacaagaaccaggattcgac

SEQ ID NO: 36421 - DNA, 21 bp, Artificial Sequence
  source: /note="Description of Artificial Sequence: Synthetic oligonucleotide"
ccacaagaaagagcaagaagc

SEQ ID NO: 36422 - DNA, 21 bp, Artificial Sequence
  source: /note="Description of Artificial Sequence: Synthetic oligonucleotide"
ccacaacacccaagcagaaac

SEQ ID NO: 36423 - DNA, 21 bp, Artificial Sequence
  source: /note="Description of Artificial Sequence: Synthetic oligonucleotide"
ccacaaatccacatcatggca

SEQ ID NO: 36424 - DNA, 21 bp, Artificial Sequence
  source: /note="Description of Artificial Sequence: Synthetic oligonucleotide"
ccacaaatcctcccaagcgca

SEQ ID NO: 36425 - DNA, 21 bp, Artificial Sequence
  source: /note="Description of Artificial Sequence: Synthetic oligonucleotide"
ccacaactcagccaaaacgtc

SEQ ID NO: 36426 - DNA, 21 bp, Artificial Sequence
  source: /note="Description of Artificial Sequence: Synthetic oligonucleotide"
ccacaaaacgcaagctacaga

SEQ ID NO: 36427 - DNA, 21 bp, Artificial Sequence
  source: /note="Description of Artificial Sequence: Synthetic oligonucleotide"
ccacaaaacaacccaccagga

SEQ ID NO: 36428 - DNA, 21 bp, Artificial Sequence
  source: /note="Description of Artificial Sequence: Synthetic oligonucleotide"
ccacaaaacagaccaccagtc

SEQ ID NO: 36429 - DNA, 21 bp, Artificial Sequence
  source: /note="Description of Artificial Sequence: Synthetic oligonucleotide"
ccacaaccaagaaacgtcatc

SEQ ID NO: 36430 - DNA, 21 bp, Artificial Sequence
  source: /note="Description of Artificial Sequence: Synthetic oligonucleotide"
ccacaaccaacagaaacacca

SEQ ID NO: 36431 - DNA, 21 bp, Artificial Sequence
  source: /note="Description of Artificial Sequence: Synthetic oligonucleotide"
ccacaaccaacatacacactc

SEQ ID NO: 36432 - DNA, 21 bp, Artificial Sequence
  source: /note="Description of Artificial Sequence: Synthetic oligonucleotide"
ccacaaagaaacgcaggagca

SEQ ID NO: 36433 - DNA, 21 bp, Artificial Sequence
  source: /note="Description of Artificial Sequence: Synthetic oligonucleotide"
ccacaaagacaaggactcctc

SEQ ID NO: 36434 - DNA, 21 bp, Artificial Sequence
  source: /note="Description of Artificial Sequence: Synthetic oligonucleotide"
ccacaaagaagcgcaatgcca

SEQ ID NO: 36435 - DNA, 21 bp, Artificial Sequence
  source: /note="Description of Artificial Sequence: Synthetic oligonucleotide"
ccacaaagaacacaacaagaa

SEQ ID NO: 36436 - DNA, 21 bp, Artificial Sequence
  source: /note="Description of Artificial Sequence: Synthetic oligonucleotide"
ccacaaagagtccacgcagca

SEQ ID NO: 36437 - DNA, 21 bp, Artificial Sequence
  source: /note="Description of Artificial Sequence: Synthetic oligonucleotide"
ccacaaagcctccacgtcaga

SEQ ID NO: 36438 - DNA, 21 bp, Artificial Sequence
  source: /note="Description of Artificial Sequence: Synthetic oligonucleotide"
ccacaaagcccaaaccacagc

SEQ ID NO: 36439 - DNA, 21 bp, Artificial Sequence
  source: /note="Description of Artificial Sequence: Synthetic oligonucleotide"
ccacaaagcagagacacatac

SEQ ID NO: 36440 - DNA, 21 bp, Artificial Sequence
  source: /note="Description of Artificial Sequence: Synthetic oligonucleotide"
ccacaaagcagaaacacaaac

SEQ ID NO: 36441 - DNA, 21 bp, Artificial Sequence
  source: /note="Description of Artificial Sequence: Synthetic oligonucleotide"
ccacaaacactcacaagcgtc

SEQ ID NO: 36442 - DNA, 21 bp, Artificial Sequence
  source: /note="Description of Artificial Sequence: Synthetic oligonucleotide"
ccacaaacaagaagcccaagc

SEQ ID NO: 36443 - DNA, 21 bp, Artificial Sequence
  source: /note="Description of Artificial Sequence: Synthetic oligonucleotide"
ccacaaacagtcacaaaagtc

SEQ ID NO: 36444 - DNA, 21 bp, Artificial Sequence
  source: /note="Description of Artificial Sequence: Synthetic oligonucleotide"
ccacaagtcagagcaagccaa

SEQ ID NO: 36445 - DNA, 21 bp, Artificial Sequence
  source: /note="Description of Artificial Sequence: Synthetic oligonucleotide"
ccacaagtcagacaaggacca

SEQ ID NO: 36446 - DNA, 21 bp, Artificial Sequence
  source: /note="Description of Artificial Sequence: Synthetic oligonucleotide"
ccacaagtcacaacaagcgca

SEQ ID NO: 36447 - DNA, 21 bp, Artificial Sequence
  source: /note="Description of Artificial Sequence: Synthetic oligonucleotide"
ccaagagcaaacagcggaatg

SEQ ID NO: 36448 - DNA, 21 bp, Artificial Sequence
  source: /note="Description of Artificial Sequence: Synthetic oligonucleotide"
ccaagagcaaacacattcagc

SEQ ID NO: 36449 - DNA, 21 bp, Artificial Sequence
  source: /note="Description of Artificial Sequence: Synthetic oligonucleotide"
ccaagagcaccagcagtcagc

SEQ ID NO: 36450 - DNA, 21 bp, Artificial Sequence
  source: /note="Description of Artificial Sequence: Synthetic oligonucleotide"
ccaagagcaagcggaccatac

SEQ ID NO: 36451 - DNA, 21 bp, Artificial Sequence
  source: /note="Description of Artificial Sequence: Synthetic oligonucleotide"
ccaagagcaacaacatacagc

SEQ ID NO: 36452 - DNA, 21 bp, Artificial Sequence
  source: /note="Description of Artificial Sequence: Synthetic oligonucleotide"
ccaagagacgcaacaagactc

SEQ ID NO: 36453 - DNA, 21 bp, Artificial Sequence
  source: /note="Description of Artificial Sequence: Synthetic oligonucleotide"
ccaagagacaaaaacccagca

SEQ ID NO: 36454 - DNA, 21 bp, Artificial Sequence
  source: /note="Description of Artificial Sequence: Synthetic oligonucleotide"
ccaagagacagactcgtcatc

SEQ ID NO: 36455 - DNA, 21 bp, Artificial Sequence
  source: /note="Description of Artificial Sequence: Synthetic oligonucleotide"
ccaagagactaccaaacaagc

SEQ ID NO: 36456 - DNA, 21 bp, Artificial Sequence
  source: /note="Description of Artificial Sequence: Synthetic oligonucleotide"
ccaagagaaaaagcagcaaca

SEQ ID NO: 36457 - DNA, 21 bp, Artificial Sequence
  source: /note="Description of Artificial Sequence: Synthetic oligonucleotide"
ccaagagaaccatacgcagaa

SEQ ID NO: 36458 - DNA, 21 bp, Artificial Sequence
  source: /note="Description of Artificial Sequence: Synthetic oligonucleotide"
ccaagaggagaaggaacaaac

SEQ ID NO: 36459 - DNA, 21 bp, Artificial Sequence
  source: /note="Description of Artificial Sequence: Synthetic oligonucleotide"
ccaagaggattcgaaacagca

SEQ ID NO: 36460 - DNA, 21 bp, Artificial Sequence
  source: /note="Description of Artificial Sequence: Synthetic oligonucleotide"
ccaagaggactcagcagcgca

SEQ ID NO: 36461 - DNA, 21 bp, Artificial Sequence
  source: /note="Description of Artificial Sequence: Synthetic oligonucleotide"
ccaagaggacaaatcgcaagc

SEQ ID NO: 36462 - DNA, 21 bp, Artificial Sequence
  source: /note="Description of Artificial Sequence: Synthetic oligonucleotide"
ccaagaggaagcggaagcagc

SEQ ID NO: 36463 - DNA, 21 bp, Artificial Sequence
  source: /note="Description of Artificial Sequence: Synthetic oligonucleotide"
ccaagaggaagcagcgactac

SEQ ID NO: 36464 - DNA, 21 bp, Artificial Sequence
  source: /note="Description of Artificial Sequence: Synthetic oligonucleotide"
ccaagacacacagtctacgca

SEQ ID NO: 36465 - DNA, 21 bp, Artificial Sequence
  source: /note="Description of Artificial Sequence: Synthetic oligonucleotide"
ccaagaatcgaagcaagaaac

SEQ ID NO: 36466 - DNA, 21 bp, Artificial Sequence
  source: /note="Description of Artificial Sequence: Synthetic oligonucleotide"
ccaagaatcatcaacacaatc

SEQ ID NO: 36467 - DNA, 21 bp, Artificial Sequence
  source: /note="Description of Artificial Sequence: Synthetic oligonucleotide"
ccaagaatcccacaaacacac

SEQ ID NO: 36468 - DNA, 21 bp, Artificial Sequence
  source: /note="Description of Artificial Sequence: Synthetic oligonucleotide"
ccaagaaaactcccaggagac

SEQ ID NO: 36469 - DNA, 21 bp, Artificial Sequence
  source: /note="Description of Artificial Sequence: Synthetic oligonucleotide"
ccaagaaaagtcggactcagc

SEQ ID NO: 36470 - DNA, 21 bp, Artificial Sequence
  source: /note="Description of Artificial Sequence: Synthetic oligonucleotide"
ccaagactcgcaggaggaatc

SEQ ID NO: 36471 - DNA, 21 bp, Artificial Sequence
  source: /note="Description of Artificial Sequence: Synthetic oligonucleotide"
ccaagactcggaggagtcgtc

SEQ ID NO: 36472 - DNA, 21 bp, Artificial Sequence
  source: /note="Description of Artificial Sequence: Synthetic oligonucleotide"
ccaagactcggactcgacaac

SEQ ID NO: 36473 - DNA, 21 bp, Artificial Sequence
  source: /note="Description of Artificial Sequence: Synthetic oligonucleotide"
ccaagactcaacgaaatgcca

SEQ ID NO: 36474 - DNA, 21 bp, Artificial Sequence
  source: /note="Description of Artificial Sequence: Synthetic oligonucleotide"
ccaagactcacagcaagcatc

SEQ ID NO: 36475 - DNA, 21 bp, Artificial Sequence
  source: /note="Description of Artificial Sequence: Synthetic oligonucleotide"
ccaagaatgagcgcaagcgtc

SEQ ID NO: 36476 - DNA, 21 bp, Artificial Sequence
  source: /note="Description of Artificial Sequence: Synthetic oligonucleotide"
ccaagaaacgcaagcacacca

SEQ ID NO: 36477 - DNA, 21 bp, Artificial Sequence
  source: /note="Description of Artificial Sequence: Synthetic oligonucleotide"
ccaagaaacccagaattcgga

SEQ ID NO: 36478 - DNA, 21 bp, Artificial Sequence
  source: /note="Description of Artificial Sequence: Synthetic oligonucleotide"
ccaagaaaccaatacgcagca

SEQ ID NO: 36479 - DNA, 21 bp, Artificial Sequence
  source: /note="Description of Artificial Sequence: Synthetic oligonucleotide"
ccaagaaacagactcagcgac

SEQ ID NO: 36480 - DNA, 21 bp, Artificial Sequence
  source: /note="Description of Artificial Sequence: Synthetic oligonucleotide"
ccaagaccagcaccagtccac

SEQ ID NO: 36481 - DNA, 21 bp, Artificial Sequence
  source: /note="Description of Artificial Sequence: Synthetic oligonucleotide"
ccaagaccagcagtcccagca

SEQ ID NO: 36482 - DNA, 21 bp, Artificial Sequence
  source: /note="Description of Artificial Sequence: Synthetic oligonucleotide"
ccaagaccaggaatggacaaa

SEQ ID NO: 36483 - DNA, 21 bp, Artificial Sequence
  source: /note="Description of Artificial Sequence: Synthetic oligonucleotide"
ccaagaccacaagcaaacagc

SEQ ID NO: 36484 - DNA, 21 bp, Artificial Sequence
  source: /note="Description of Artificial Sequence: Synthetic oligonucleotide"
ccaagaccacaaagcctcaca

SEQ ID NO: 36485 - DNA, 21 bp, Artificial Sequence
  source: /note="Description of Artificial Sequence: Synthetic oligonucleotide"
ccaagaccaagcctcgacctc

SEQ ID NO: 36486 - DNA, 21 bp, Artificial Sequence
  source: /note="Description of Artificial Sequence: Synthetic oligonucleotide"
ccaagaccaacacacgcagtc

SEQ ID NO: 36487 - DNA, 21 bp, Artificial Sequence
  source: /note="Description of Artificial Sequence: Synthetic oligonucleotide"
ccaagacaaacagaaggaatg

SEQ ID NO: 36488 - DNA, 21 bp, Artificial Sequence
  source: /note="Description of Artificial Sequence: Synthetic oligonucleotide"
ccaagacaaacaacaaacgga

SEQ ID NO: 36489 - DNA, 21 bp, Artificial Sequence
  source: /note="Description of Artificial Sequence: Synthetic oligonucleotide"
ccaagaagagaccaagaaaca

SEQ ID NO: 36490 - DNA, 21 bp, Artificial Sequence
  source: /note="Description of Artificial Sequence: Synthetic oligonucleotide"
ccaagaagaatcgaattccca

SEQ ID NO: 36491 - DNA, 21 bp, Artificial Sequence
  source: /note="Description of Artificial Sequence: Synthetic oligonucleotide"
ccaagaagcgcagacctcgaa

SEQ ID NO: 36492 - DNA, 21 bp, Artificial Sequence
  source: /note="Description of Artificial Sequence: Synthetic oligonucleotide"
ccaagaagcggaacagcaagc

SEQ ID NO: 36493 - DNA, 21 bp, Artificial Sequence
  source: /note="Description of Artificial Sequence: Synthetic oligonucleotide"
ccaagaagccacccaacaagc

SEQ ID NO: 36494 - DNA, 21 bp, Artificial Sequence
  source: /note="Description of Artificial Sequence: Synthetic oligonucleotide"
ccaagaagcatcccaggactc

SEQ ID NO: 36495 - DNA, 21 bp, Artificial Sequence
  source: /note="Description of Artificial Sequence: Synthetic oligonucleotide"
ccaagaagcctcccactcaca

SEQ ID NO: 36496 - DNA, 21 bp, Artificial Sequence
  source: /note="Description of Artificial Sequence: Synthetic oligonucleotide"
ccaagaagcatgaaccaaaca

SEQ ID NO: 36497 - DNA, 21 bp, Artificial Sequence
  source: /note="Description of Artificial Sequence: Synthetic oligonucleotide"
ccaagaagcaacagcgacaca

SEQ ID NO: 36498 - DNA, 21 bp, Artificial Sequence
  source: /note="Description of Artificial Sequence: Synthetic oligonucleotide"
ccaagaagcccaaacccacca

SEQ ID NO: 36499 - DNA, 21 bp, Artificial Sequence
  source: /note="Description of Artificial Sequence: Synthetic oligonucleotide"
ccaagaagcccaagcgacaaa

SEQ ID NO: 36500 - DNA, 21 bp, Artificial Sequence
  source: /note="Description of Artificial Sequence: Synthetic oligonucleotide"
ccaagaagcagcttcacagaa

SEQ ID NO: 36501 - DNA, 21 bp, Artificial Sequence
  source: /note="Description of Artificial Sequence: Synthetic oligonucleotide"
ccaagaagcagcagcagcctc

SEQ ID NO: 36502 - DNA, 21 bp, Artificial Sequence
  source: /note="Description of Artificial Sequence: Synthetic oligonucleotide"
ccaagaacagaaccattcctc

SEQ ID NO: 36503 - DNA, 21 bp, Artificial Sequence
  source: /note="Description of Artificial Sequence: Synthetic oligonucleotide"
ccaagaacacacacagacgca

SEQ ID NO: 36504 - DNA, 21 bp, Artificial Sequence
  source: /note="Description of Artificial Sequence: Synthetic oligonucleotide"
ccaagaacaagcggaacaatg

SEQ ID NO: 36505 - DNA, 21 bp, Artificial Sequence
  source: /note="Description of Artificial Sequence: Synthetic oligonucleotide"
ccaagaacaagcagcacacac

SEQ ID NO: 36506 - DNA, 21 bp, Artificial Sequence
  source: /note="Description of Artificial Sequence: Synthetic oligonucleotide"
ccaagaacaacaatgacagaa

SEQ ID NO: 36507 - DNA, 21 bp, Artificial Sequence
  source: /note="Description of Artificial Sequence: Synthetic oligonucleotide"
ccaagaacaacatacagcgac

SEQ ID NO: 36508 - DNA, 21 bp, Artificial Sequence
  source: /note="Description of Artificial Sequence: Synthetic oligonucleotide"
ccaagagtcggaagcccacaa

SEQ ID NO: 36509 - DNA, 21 bp, Artificial Sequence
  source: /note="Description of Artificial Sequence: Synthetic oligonucleotide"
ccaagagtcctcagcagcgga

SEQ ID NO: 36510 - DNA, 21 bp, Artificial Sequence
  source: /note="Description of Artificial Sequence: Synthetic oligonucleotide"
ccaagagtcccaacacacgac

SEQ ID NO: 36511 - DNA, 21 bp, Artificial Sequence
  source: /note="Description of Artificial Sequence: Synthetic oligonucleotide"
ccaagagtcagcatcgcaaac

SEQ ID NO: 36512 - DNA, 21 bp, Artificial Sequence
  source: /note="Description of Artificial Sequence: Synthetic oligonucleotide"
ccaagagtcagcgtcgcacca

SEQ ID NO: 36513 - DNA, 21 bp, Artificial Sequence
  source: /note="Description of Artificial Sequence: Synthetic oligonucleotide"
ccaagatacgacgcagcagga

SEQ ID NO: 36514 - DNA, 21 bp, Artificial Sequence
  source: /note="Description of Artificial Sequence: Synthetic oligonucleotide"
ccaagcgcagcacacccacca

SEQ ID NO: 36515 - DNA, 21 bp, Artificial Sequence
  source: /note="Description of Artificial Sequence: Synthetic oligonucleotide"
ccaagcgcaaacatgagaagc

SEQ ID NO: 36516 - DNA, 21 bp, Artificial Sequence
  source: /note="Description of Artificial Sequence: Synthetic oligonucleotide"
ccaagcgcaaacagactcagc

SEQ ID NO: 36517 - DNA, 21 bp, Artificial Sequence
  source: /note="Description of Artificial Sequence: Synthetic oligonucleotide"
ccaagcgcacaaagccacagc

SEQ ID NO: 36518 - DNA, 21 bp, Artificial Sequence
  source: /note="Description of Artificial Sequence: Synthetic oligonucleotide"
ccaagcgcaagcaacagcatg

SEQ ID NO: 36519 - DNA, 21 bp, Artificial Sequence
  source: /note="Description of Artificial Sequence: Synthetic oligonucleotide"
ccaagcgcaacaggagtcaaa

SEQ ID NO: 36520 - DNA, 21 bp, Artificial Sequence
  source: /note="Description of Artificial Sequence: Synthetic oligonucleotide"
ccaagctgcgacaacaacaca

SEQ ID NO: 36521 - DNA, 21 bp, Artificial Sequence
  source: /note="Description of Artificial Sequence: Synthetic oligonucleotide"
ccaagcgacgacgcaggagga

SEQ ID NO: 36522 - DNA, 21 bp, Artificial Sequence
  source: /note="Description of Artificial Sequence: Synthetic oligonucleotide"
ccaagcgacaaaaacacagga

SEQ ID NO: 36523 - DNA, 21 bp, Artificial Sequence
  source: /note="Description of Artificial Sequence: Synthetic oligonucleotide"
ccaagcgacaaaagcttcaga

SEQ ID NO: 36524 - DNA, 21 bp, Artificial Sequence
  source: /note="Description of Artificial Sequence: Synthetic oligonucleotide"
ccaagcgacatgccaagcagc

SEQ ID NO: 36525 - DNA, 21 bp, Artificial Sequence
  source: /note="Description of Artificial Sequence: Synthetic oligonucleotide"
ccaagcgacccaagcgcagga

SEQ ID NO: 36526 - DNA, 21 bp, Artificial Sequence
  source: /note="Description of Artificial Sequence: Synthetic oligonucleotide"
ccaagcgacccagtcacaaga

SEQ ID NO: 36527 - DNA, 21 bp, Artificial Sequence
  source: /note="Description of Artificial Sequence: Synthetic oligonucleotide"
ccaagcgacagagtccacaca

SEQ ID NO: 36528 - DNA, 21 bp, Artificial Sequence
  source: /note="Description of Artificial Sequence: Synthetic oligonucleotide"
ccaagcgacagcgcataccca

SEQ ID NO: 36529 - DNA, 21 bp, Artificial Sequence
  source: /note="Description of Artificial Sequence: Synthetic oligonucleotide"
ccaagcgacagcgtccacagc

SEQ ID NO: 36530 - DNA, 21 bp, Artificial Sequence
  source: /note="Description of Artificial Sequence: Synthetic oligonucleotide"
ccaagcgacacacacagaagc

SEQ ID NO: 36531 - DNA, 21 bp, Artificial Sequence
  source: /note="Description of Artificial Sequence: Synthetic oligonucleotide"
ccaagcgacacaccaacaaga

SEQ ID NO: 36532 - DNA, 21 bp, Artificial Sequence
  source: /note="Description of Artificial Sequence: Synthetic oligonucleotide"
ccaagcgaactcaacagcaga

SEQ ID NO: 36533 - DNA, 21 bp, Artificial Sequence
  source: /note="Description of Artificial Sequence: Synthetic oligonucleotide"
ccaagcgaacaaccagtcaga

SEQ ID NO: 36534 - DNA, 21 bp, Artificial Sequence
  source: /note="Description of Artificial Sequence: Synthetic oligonucleotide"
ccaagcgaaagcacaatcgtc

SEQ ID NO: 36535 - DNA, 21 bp, Artificial Sequence
  source: /note="Description of Artificial Sequence: Synthetic oligonucleotide"
ccaagcgaatacacactcgac

SEQ ID NO: 36536 - DNA, 21 bp, Artificial Sequence
  source: /note="Description of Artificial Sequence: Synthetic oligonucleotide"
ccaagcttcctcgaaggaatc

SEQ ID NO: 36537 - DNA, 21 bp, Artificial Sequence
  source: /note="Description of Artificial Sequence: Synthetic oligonucleotide"
ccaagcttcaacccaatgaca

SEQ ID NO: 36538 - DNA, 21 bp, Artificial Sequence
  source: /note="Description of Artificial Sequence: Synthetic oligonucleotide"
ccaagcttcccaagcatgaca

SEQ ID NO: 36539 - DNA, 21 bp, Artificial Sequence
  source: /note="Description of Artificial Sequence: Synthetic oligonucleotide"
ccaagcggaaaaagcccatac

SEQ ID NO: 36540 - DNA, 21 bp, Artificial Sequence
  source: /note="Description of Artificial Sequence: Synthetic oligonucleotide"
ccaagcggaatgaaaccaaca

SEQ ID NO: 36541 - DNA, 21 bp, Artificial Sequence
  source: /note="Description of Artificial Sequence: Synthetic oligonucleotide"
ccaagcggaatgccaagcagc

SEQ ID NO: 36542 - DNA, 21 bp, Artificial Sequence
  source: /note="Description of Artificial Sequence: Synthetic oligonucleotide"
ccaagcggacaagtcacagga

SEQ ID NO: 36543 - DNA, 21 bp, Artificial Sequence
  source: /note="Description of Artificial Sequence: Synthetic oligonucleotide"
ccaagcggaagcgacaacctc

SEQ ID NO: 36544 - DNA, 21 bp, Artificial Sequence
  source: /note="Description of Artificial Sequence: Synthetic oligonucleotide"
ccaagcggaacactcacaatg

SEQ ID NO: 36545 - DNA, 21 bp, Artificial Sequence
  source: /note="Description of Artificial Sequence: Synthetic oligonucleotide"
ccaagccacgacagcttcctc

SEQ ID NO: 36546 - DNA, 21 bp, Artificial Sequence
  source: /note="Description of Artificial Sequence: Synthetic oligonucleotide"
ccaagccacggactcgacaaa

SEQ ID NO: 36547 - DNA, 21 bp, Artificial Sequence
  source: /note="Description of Artificial Sequence: Synthetic oligonucleotide"
ccaagccacaaagcagtcttc

SEQ ID NO: 36548 - DNA, 21 bp, Artificial Sequence
  source: /note="Description of Artificial Sequence: Synthetic oligonucleotide"
ccaagccacccacacgaaaga

SEQ ID NO: 36549 - DNA, 21 bp, Artificial Sequence
  source: /note="Description of Artificial Sequence: Synthetic oligonucleotide"
ccaagccacagaacaagcctc

SEQ ID NO: 36550 - DNA, 21 bp, Artificial Sequence
  source: /note="Description of Artificial Sequence: Synthetic oligonucleotide"
ccaagccacagcggaacaaca

SEQ ID NO: 36551 - DNA, 21 bp, Artificial Sequence
  source: /note="Description of Artificial Sequence: Synthetic oligonucleotide"
ccaagccacacaagaccagtc

SEQ ID NO: 36552 - DNA, 21 bp, Artificial Sequence
  source: /note="Description of Artificial Sequence: Synthetic oligonucleotide"
ccaagcatcgcacaaccacca

SEQ ID NO: 36553 - DNA, 21 bp, Artificial Sequence
  source: /note="Description of Artificial Sequence: Synthetic oligonucleotide"
ccaagcatcaaactcagcgaa

SEQ ID NO: 36554 - DNA, 21 bp, Artificial Sequence
  source: /note="Description of Artificial Sequence: Synthetic oligonucleotide"
ccaagcatcagcaaaccaatg

SEQ ID NO: 36555 - DNA, 21 bp, Artificial Sequence
  source: /note="Description of Artificial Sequence: Synthetic oligonucleotide"
ccaagcaaagcaagcacagaa

SEQ ID NO: 36556 - DNA, 21 bp, Artificial Sequence
  source: /note="Description of Artificial Sequence: Synthetic oligonucleotide"
ccaagcaaaagcccaagcaca

SEQ ID NO: 36557 - DNA, 21 bp, Artificial Sequence
  source: /note="Description of Artificial Sequence: Synthetic oligonucleotide"
ccaagcaaaagcagcgcagca

SEQ ID NO: 36558 - DNA, 21 bp, Artificial Sequence
  source: /note="Description of Artificial Sequence: Synthetic oligonucleotide"
ccaagcaaagtcggaagagaa

SEQ ID NO: 36559 - DNA, 21 bp, Artificial Sequence
  source: /note="Description of Artificial Sequence: Synthetic oligonucleotide"
ccaagcctcgaaggagcacca

SEQ ID NO: 36560 - DNA, 21 bp, Artificial Sequence
  source: /note="Description of Artificial Sequence: Synthetic oligonucleotide"
ccaagcctcagagcagcactc

SEQ ID NO: 36561 - DNA, 21 bp, Artificial Sequence
  source: /note="Description of Artificial Sequence: Synthetic oligonucleotide"
ccaagcctcagcaacaaagtc

SEQ ID NO: 36562 - DNA, 21 bp, Artificial Sequence
  source: /note="Description of Artificial Sequence: Synthetic oligonucleotide"
ccaagcctcagcagcagccca

SEQ ID NO: 36563 - DNA, 21 bp, Artificial Sequence
  source: /note="Description of Artificial Sequence: Synthetic oligonucleotide"
ccaagcatgagcccacacaca

SEQ ID NO: 36564 - DNA, 21 bp, Artificial Sequence
  source: /note="Description of Artificial Sequence: Synthetic oligonucleotide"
ccaagcatgacagcacaagaa

SEQ ID NO: 36565 - DNA, 21 bp, Artificial Sequence
  source: /note="Description of Artificial Sequence: Synthetic oligonucleotide"
ccaagcaacgcaggaagattc

SEQ ID NO: 36566 - DNA, 21 bp, Artificial Sequence
  source: /note="Description of Artificial Sequence: Synthetic oligonucleotide"
ccaagcaacggaaaaagcatc

SEQ ID NO: 36567 - DNA, 21 bp, Artificial Sequence
  source: /note="Description of Artificial Sequence: Synthetic oligonucleotide"
ccaagcaaccacctcaaaagc

SEQ ID NO: 36568 - DNA, 21 bp, Artificial Sequence
  source: /note="Description of Artificial Sequence: Synthetic oligonucleotide"
ccaagcaacaacacagaagga

SEQ ID NO: 36569 - DNA, 21 bp, Artificial Sequence
  source: /note="Description of Artificial Sequence: Synthetic oligonucleotide"
ccaagcaacccaagcttcaga

SEQ ID NO: 36570 - DNA, 21 bp, Artificial Sequence
  source: /note="Description of Artificial Sequence: Synthetic oligonucleotide"
ccaagcaaccaactcgtcaga

SEQ ID NO: 36571 - DNA, 21 bp, Artificial Sequence
  source: /note="Description of Artificial Sequence: Synthetic oligonucleotide"
ccaagcccagcagtcaaaagc

SEQ ID NO: 36572 - DNA, 21 bp, Artificial Sequence
  source: /note="Description of Artificial Sequence: Synthetic oligonucleotide"
ccaagcccagacgtcagagga

SEQ ID NO: 36573 - DNA, 21 bp, Artificial Sequence
  source: /note="Description of Artificial Sequence: Synthetic oligonucleotide"
ccaagcccaaaaacatgccca

SEQ ID NO: 36574 - DNA, 21 bp, Artificial Sequence
  source: /note="Description of Artificial Sequence: Synthetic oligonucleotide"
ccaagcccactcagactcgga

SEQ ID NO: 36575 - DNA, 21 bp, Artificial Sequence
  source: /note="Description of Artificial Sequence: Synthetic oligonucleotide"
ccaagcccagtcaaaggagga

SEQ ID NO: 36576 - DNA, 21 bp, Artificial Sequence
  source: /note="Description of Artificial Sequence: Synthetic oligonucleotide"
ccaagccaagacccacacctc

SEQ ID NO: 36577 - DNA, 21 bp, Artificial Sequence
  source: /note="Description of Artificial Sequence: Synthetic oligonucleotide"
ccaagccaagacagacaagca

SEQ ID NO: 36578 - DNA, 21 bp, Artificial Sequence
  source: /note="Description of Artificial Sequence: Synthetic oligonucleotide"
ccaagccaattcaaagaaaac

SEQ ID NO: 36579 - DNA, 21 bp, Artificial Sequence
  source: /note="Description of Artificial Sequence: Synthetic oligonucleotide"
ccaagccaaggacacagcatg

SEQ ID NO: 36580 - DNA, 21 bp, Artificial Sequence
  source: /note="Description of Artificial Sequence: Synthetic oligonucleotide"
ccaagccaaggaccatggaca

SEQ ID NO: 36581 - DNA, 21 bp, Artificial Sequence
  source: /note="Description of Artificial Sequence: Synthetic oligonucleotide"
ccaagccaactcgcaagcaac

SEQ ID NO: 36582 - DNA, 21 bp, Artificial Sequence
  source: /note="Description of Artificial Sequence: Synthetic oligonucleotide"
ccaagccaactcgtcgtcgca

SEQ ID NO: 36583 - DNA, 21 bp, Artificial Sequence
  source: /note="Description of Artificial Sequence: Synthetic oligonucleotide"
ccaagccaaccaggagcaatc

SEQ ID NO: 36584 - DNA, 21 bp, Artificial Sequence
  source: /note="Description of Artificial Sequence: Synthetic oligonucleotide"
ccaagccaaagagaaatgaaa

SEQ ID NO: 36585 - DNA, 21 bp, Artificial Sequence
  source: /note="Description of Artificial Sequence: Synthetic oligonucleotide"
ccaagccaaagcaacctcaga

SEQ ID NO: 36586 - DNA, 21 bp, Artificial Sequence
  source: /note="Description of Artificial Sequence: Synthetic oligonucleotide"
ccaagccaaagcagcaaactc

SEQ ID NO: 36587 - DNA, 21 bp, Artificial Sequence
  source: /note="Description of Artificial Sequence: Synthetic oligonucleotide"
ccaagccaaacagcaacacca

SEQ ID NO: 36588 - DNA, 21 bp, Artificial Sequence
  source: /note="Description of Artificial Sequence: Synthetic oligonucleotide"
ccaagccaaacacacagccca

SEQ ID NO: 36589 - DNA, 21 bp, Artificial Sequence
  source: /note="Description of Artificial Sequence: Synthetic oligonucleotide"
ccaagcagagaaatcagcctc

SEQ ID NO: 36590 - DNA, 21 bp, Artificial Sequence
  source: /note="Description of Artificial Sequence: Synthetic oligonucleotide"
ccaagcagagaaagaagcaac

SEQ ID NO: 36591 - DNA, 21 bp, Artificial Sequence
  source: /note="Description of Artificial Sequence: Synthetic oligonucleotide"
ccaagcagattcagcacacca

SEQ ID NO: 36592 - DNA, 21 bp, Artificial Sequence
  source: /note="Description of Artificial Sequence: Synthetic oligonucleotide"
ccaagcagaggagacatcgga

SEQ ID NO: 36593 - DNA, 21 bp, Artificial Sequence
  source: /note="Description of Artificial Sequence: Synthetic oligonucleotide"
ccaagcagaggagtcctccca

SEQ ID NO: 36594 - DNA, 21 bp, Artificial Sequence
  source: /note="Description of Artificial Sequence: Synthetic oligonucleotide"
ccaagcagactcggaagcgca

SEQ ID NO: 36595 - DNA, 21 bp, Artificial Sequence
  source: /note="Description of Artificial Sequence: Synthetic oligonucleotide"
ccaagcagactcacaaacgac

SEQ ID NO: 36596 - DNA, 21 bp, Artificial Sequence
  source: /note="Description of Artificial Sequence: Synthetic oligonucleotide"
ccaagcagactcgtcagcgaa

SEQ ID NO: 36597 - DNA, 21 bp, Artificial Sequence
  source: /note="Description of Artificial Sequence: Synthetic oligonucleotide"
ccaagcagaccaatgatgagc

SEQ ID NO: 36598 - DNA, 21 bp, Artificial Sequence
  source: /note="Description of Artificial Sequence: Synthetic oligonucleotide"
ccaagcagaagcatgagcgaa

SEQ ID NO: 36599 - DNA, 21 bp, Artificial Sequence
  source: /note="Description of Artificial Sequence: Synthetic oligonucleotide"
ccaagcagaacagaaccacca

SEQ ID NO: 36600 - DNA, 21 bp, Artificial Sequence
  source: /note="Description of Artificial Sequence: Synthetic oligonucleotide"
ccaagcagaacacacctccac

SEQ ID NO: 36601 - DNA, 21 bp, Artificial Sequence
  source: /note="Description of Artificial Sequence: Synthetic oligonucleotide"
ccaagcagagtcgtcgaagca

SEQ ID NO: 36602 - DNA, 21 bp, Artificial Sequence
  source: /note="Description of Artificial Sequence: Synthetic oligonucleotide"
ccaagcagcgaaagcgacttc

SEQ ID NO: 36603 - DNA, 21 bp, Artificial Sequence
  source: /note="Description of Artificial Sequence: Synthetic oligonucleotide"
ccaagcagcggaggactcgtc

SEQ ID NO: 36604 - DNA, 21 bp, Artificial Sequence
  source: /note="Description of Artificial Sequence: Synthetic oligonucleotide"
ccaagcagcggactccacctc

SEQ ID NO: 36605 - DNA, 21 bp, Artificial Sequence
  source: /note="Description of Artificial Sequence: Synthetic oligonucleotide"
ccaagcagcaaaggactcctc

SEQ ID NO: 36606 - DNA, 21 bp, Artificial Sequence
  source: /note="Description of Artificial Sequence: Synthetic oligonucleotide"
ccaagcagcaaagtcggagac

SEQ ID NO: 36607 - DNA, 21 bp, Artificial Sequence
  source: /note="Description of Artificial Sequence: Synthetic oligonucleotide"
ccaagcagcctcgacgacgga

SEQ ID NO: 36608 - DNA, 21 bp, Artificial Sequence
  source: /note="Description of Artificial Sequence: Synthetic oligonucleotide"
ccaagcagcctcaacagactc

SEQ ID NO: 36609 - DNA, 21 bp, Artificial Sequence
  source: /note="Description of Artificial Sequence: Synthetic oligonucleotide"
ccaagcagcctcagcgcagga

SEQ ID NO: 36610 - DNA, 21 bp, Artificial Sequence
  source: /note="Description of Artificial Sequence: Synthetic oligonucleotide"
ccaagcagcatggcacaccca

SEQ ID NO: 36611 - DNA, 21 bp, Artificial Sequence
  source: /note="Description of Artificial Sequence: Synthetic oligonucleotide"
ccaagcagcatgatcgcagaa

SEQ ID NO: 36612 - DNA, 21 bp, Artificial Sequence
  source: /note="Description of Artificial Sequence: Synthetic oligonucleotide"
ccaagcagcccagcagtcaga

SEQ ID NO: 36613 - DNA, 21 bp, Artificial Sequence
  source: /note="Description of Artificial Sequence: Synthetic oligonucleotide"
ccaagcagcccactcatgaca

SEQ ID NO: 36614 - DNA, 21 bp, Artificial Sequence
  source: /note="Description of Artificial Sequence: Synthetic oligonucleotide"
ccaagcagcccaccattcttc

SEQ ID NO: 36615 - DNA, 21 bp, Artificial Sequence
  source: /note="Description of Artificial Sequence: Synthetic oligonucleotide"
ccaagcagcccagtcttcatc

SEQ ID NO: 36616 - DNA, 21 bp, Artificial Sequence
  source: /note="Description of Artificial Sequence: Synthetic oligonucleotide"
ccaagcagcagaggagcactc

SEQ ID NO: 36617 - DNA, 21 bp, Artificial Sequence
  source: /note="Description of Artificial Sequence: Synthetic oligonucleotide"
ccaagcagcagcatcaacaga

SEQ ID NO: 36618 - DNA, 21 bp, Artificial Sequence
  source: /note="Description of Artificial Sequence: Synthetic oligonucleotide"
ccaagcagcagcagcggaaac

SEQ ID NO: 36619 - DNA, 21 bp, Artificial Sequence
  source: /note="Description of Artificial Sequence: Synthetic oligonucleotide"
ccaagcagcagctacccactc

SEQ ID NO: 36620 - DNA, 21 bp, Artificial Sequence
  source: /note="Description of Artificial Sequence: Synthetic oligonucleotide"
ccaagcagcacaccaggacaa

SEQ ID NO: 36621 - DNA, 21 bp, Artificial Sequence
  source: /note="Description of Artificial Sequence: Synthetic oligonucleotide"
ccaagcacagcaggaagcaaa

SEQ ID NO: 36622 - DNA, 21 bp, Artificial Sequence
  source: /note="Description of Artificial Sequence: Synthetic oligonucleotide"
ccaagcacagcacacagcaca

SEQ ID NO: 36623 - DNA, 21 bp, Artificial Sequence
  source: /note="Description of Artificial Sequence: Synthetic oligonucleotide"
ccaagcacagcaatcaaaaca

SEQ ID NO: 36624 - DNA, 21 bp, Artificial Sequence
  source: /note="Description of Artificial Sequence: Synthetic oligonucleotide"
ccaagcacagcaagaacaagc

SEQ ID NO: 36625 - DNA, 21 bp, Artificial Sequence
  source: /note="Description of Artificial Sequence: Synthetic oligonucleotide"
ccaagcacaggaccattccac

SEQ ID NO: 36626 - DNA, 21 bp, Artificial Sequence
  source: /note="Description of Artificial Sequence: Synthetic oligonucleotide"
ccaagcacaggaagaccactc

SEQ ID NO: 36627 - DNA, 21 bp, Artificial Sequence
  source: /note="Description of Artificial Sequence: Synthetic oligonucleotide"
ccaagcacaaaagaattcatc

SEQ ID NO: 36628 - DNA, 21 bp, Artificial Sequence
  source: /note="Description of Artificial Sequence: Synthetic oligonucleotide"
ccaagcacaaacgcatacgca

SEQ ID NO: 36629 - DNA, 21 bp, Artificial Sequence
  source: /note="Description of Artificial Sequence: Synthetic oligonucleotide"
ccaagcacaaacggaagccac

SEQ ID NO: 36630 - DNA, 21 bp, Artificial Sequence
  source: /note="Description of Artificial Sequence: Synthetic oligonucleotide"
ccaagcacaccagcagcaaac

SEQ ID NO: 36631 - DNA, 21 bp, Artificial Sequence
  source: /note="Description of Artificial Sequence: Synthetic oligonucleotide"
ccaagcacaccagcagcaagc

SEQ ID NO: 36632 - DNA, 21 bp, Artificial Sequence
  source: /note="Description of Artificial Sequence: Synthetic oligonucleotide"
ccaagcacaagcctcagcgaa

SEQ ID NO: 36633 - DNA, 21 bp, Artificial Sequence
  source: /note="Description of Artificial Sequence: Synthetic oligonucleotide"
ccaagcgtcgacagctggagc

SEQ ID NO: 36634 - DNA, 21 bp, Artificial Sequence
  source: /note="Description of Artificial Sequence: Synthetic oligonucleotide"
ccaagcgtcgacagctacctc

SEQ ID NO: 36635 - DNA, 21 bp, Artificial Sequence
  source: /note="Description of Artificial Sequence: Synthetic oligonucleotide"
ccaagcgtcgaacacgtccca

SEQ ID NO: 36636 - DNA, 21 bp, Artificial Sequence
  source: /note="Description of Artificial Sequence: Synthetic oligonucleotide"
ccaagcgtcgaaagctggagc

SEQ ID NO: 36637 - DNA, 21 bp, Artificial Sequence
  source: /note="Description of Artificial Sequence: Synthetic oligonucleotide"
ccaagcgtcctccacccaagc

SEQ ID NO: 36638 - DNA, 21 bp, Artificial Sequence
  source: /note="Description of Artificial Sequence: Synthetic oligonucleotide"
ccaagcgtcccactcatgaca

SEQ ID NO: 36639 - DNA, 21 bp, Artificial Sequence
  source: /note="Description of Artificial Sequence: Synthetic oligonucleotide"
ccaagcgtcccaagaggacca

SEQ ID NO: 36640 - DNA, 21 bp, Artificial Sequence
  source: /note="Description of Artificial Sequence: Synthetic oligonucleotide"
ccaagcgtccaacacttccca

SEQ ID NO: 36641 - DNA, 21 bp, Artificial Sequence
  source: /note="Description of Artificial Sequence: Synthetic oligonucleotide"
ccaagcgtcagagacccagca

SEQ ID NO: 36642 - DNA, 21 bp, Artificial Sequence
  source: /note="Description of Artificial Sequence: Synthetic oligonucleotide"
ccaagcgtcacaggaacaatg

SEQ ID NO: 36643 - DNA, 21 bp, Artificial Sequence
  source: /note="Description of Artificial Sequence: Synthetic oligonucleotide"
ccaagctacgacaaactcaaa

SEQ ID NO: 36644 - DNA, 21 bp, Artificial Sequence
  source: /note="Description of Artificial Sequence: Synthetic oligonucleotide"
ccaagctacccaggactcgac

SEQ ID NO: 36645 - DNA, 21 bp, Artificial Sequence
  source: /note="Description of Artificial Sequence: Synthetic oligonucleotide"
ccaagctacagccacatggaa

SEQ ID NO: 36646 - DNA, 21 bp, Artificial Sequence
  source: /note="Description of Artificial Sequence: Synthetic oligonucleotide"
ccaagctacagcgtcacagaa

SEQ ID NO: 36647 - DNA, 21 bp, Artificial Sequence
  source: /note="Description of Artificial Sequence: Synthetic oligonucleotide"
ccaacagcagcaagaccacca

SEQ ID NO: 36648 - DNA, 21 bp, Artificial Sequence
  source: /note="Description of Artificial Sequence: Synthetic oligonucleotide"
ccaacagcactcgcaagcttc

SEQ ID NO: 36649 - DNA, 21 bp, Artificial Sequence
  source: /note="Description of Artificial Sequence: Synthetic oligonucleotide"
ccaacagcactcggaaaaagc

SEQ ID NO: 36650 - DNA, 21 bp, Artificial Sequence
  source: /note="Description of Artificial Sequence: Synthetic oligonucleotide"
ccaacagcaccaacaatccca

SEQ ID NO: 36651 - DNA, 21 bp, Artificial Sequence
  source: /note="Description of Artificial Sequence: Synthetic oligonucleotide"
ccaacagcaagcccaaacaca

SEQ ID NO: 36652 - DNA, 21 bp, Artificial Sequence
  source: /note="Description of Artificial Sequence: Synthetic oligonucleotide"
ccaacagacaacacaagccca

SEQ ID NO: 36653 - DNA, 21 bp, Artificial Sequence
  source: /note="Description of Artificial Sequence: Synthetic oligonucleotide"
ccaacagacccaagagcacca

SEQ ID NO: 36654 - DNA, 21 bp, Artificial Sequence
  source: /note="Description of Artificial Sequence: Synthetic oligonucleotide"
ccaacagacagacacagcatc

SEQ ID NO: 36655 - DNA, 21 bp, Artificial Sequence
  source: /note="Description of Artificial Sequence: Synthetic oligonucleotide"
ccaacagacagaagagaaatg

SEQ ID NO: 36656 - DNA, 21 bp, Artificial Sequence
  source: /note="Description of Artificial Sequence: Synthetic oligonucleotide"
ccaacagacacagtcccacca

SEQ ID NO: 36657 - DNA, 21 bp, Artificial Sequence
  source: /note="Description of Artificial Sequence: Synthetic oligonucleotide"
ccaacagacgtcaacagagga

SEQ ID NO: 36658 - DNA, 21 bp, Artificial Sequence
  source: /note="Description of Artificial Sequence: Synthetic oligonucleotide"
ccaacagactacgcaagagga

SEQ ID NO: 36659 - DNA, 21 bp, Artificial Sequence
  source: /note="Description of Artificial Sequence: Synthetic oligonucleotide"
ccaacagaagcagcaggagtc

SEQ ID NO: 36660 - DNA, 21 bp, Artificial Sequence
  source: /note="Description of Artificial Sequence: Synthetic oligonucleotide"
ccaacagaaacaaacggatac

SEQ ID NO: 36661 - DNA, 21 bp, Artificial Sequence
  source: /note="Description of Artificial Sequence: Synthetic oligonucleotide"
ccaacattcctcacaacaaac

SEQ ID NO: 36662 - DNA, 21 bp, Artificial Sequence
  source: /note="Description of Artificial Sequence: Synthetic oligonucleotide"
ccaacattcacaagaagcaca

SEQ ID NO: 36663 - DNA, 21 bp, Artificial Sequence
  source: /note="Description of Artificial Sequence: Synthetic oligonucleotide"
ccaacaggagcaacaagcagc

SEQ ID NO: 36664 - DNA, 21 bp, Artificial Sequence
  source: /note="Description of Artificial Sequence: Synthetic oligonucleotide"
ccaacaggaggagcacacaca

SEQ ID NO: 36665 - DNA, 21 bp, Artificial Sequence
  source: /note="Description of Artificial Sequence: Synthetic oligonucleotide"
ccaacaggaccaggaagccca

SEQ ID NO: 36666 - DNA, 21 bp, Artificial Sequence
  source: /note="Description of Artificial Sequence: Synthetic oligonucleotide"
ccaacaggaccacacgacctc

SEQ ID NO: 36667 - DNA, 21 bp, Artificial Sequence
  source: /note="Description of Artificial Sequence: Synthetic oligonucleotide"
ccaacaggacaaccaagacca

SEQ ID NO: 36668 - DNA, 21 bp, Artificial Sequence
  source: /note="Description of Artificial Sequence: Synthetic oligonucleotide"
ccaacaggaagagcactcgca

SEQ ID NO: 36669 - DNA, 21 bp, Artificial Sequence
  source: /note="Description of Artificial Sequence: Synthetic oligonucleotide"
ccaacaggaagcatccaaatc

SEQ ID NO: 36670 - DNA, 21 bp, Artificial Sequence
  source: /note="Description of Artificial Sequence: Synthetic oligonucleotide"
ccaacaggaacaccagaaatc

SEQ ID NO: 36671 - DNA, 21 bp, Artificial Sequence
  source: /note="Description of Artificial Sequence: Synthetic oligonucleotide"
ccaacaggaacaagcccactc

SEQ ID NO: 36672 - DNA, 21 bp, Artificial Sequence
  source: /note="Description of Artificial Sequence: Synthetic oligonucleotide"
ccaacaggagtcggaagcctc

SEQ ID NO: 36673 - DNA, 21 bp, Artificial Sequence
  source: /note="Description of Artificial Sequence: Synthetic oligonucleotide"
ccaacacacccaaacagcttc

SEQ ID NO: 36674 - DNA, 21 bp, Artificial Sequence
  source: /note="Description of Artificial Sequence: Synthetic oligonucleotide"
ccaacacacagcggaatcaca

SEQ ID NO: 36675 - DNA, 21 bp, Artificial Sequence
  source: /note="Description of Artificial Sequence: Synthetic oligonucleotide"
ccaacacacagcctcatcagc

SEQ ID NO: 36676 - DNA, 21 bp, Artificial Sequence
  source: /note="Description of Artificial Sequence: Synthetic oligonucleotide"
ccaacacacagcacaaacaaa

SEQ ID NO: 36677 - DNA, 21 bp, Artificial Sequence
  source: /note="Description of Artificial Sequence: Synthetic oligonucleotide"
ccaacaatcccaaaaaaagac

SEQ ID NO: 36678 - DNA, 21 bp, Artificial Sequence
  source: /note="Description of Artificial Sequence: Synthetic oligonucleotide"
ccaacaatcccactcgacaga

SEQ ID NO: 36679 - DNA, 21 bp, Artificial Sequence
  source: /note="Description of Artificial Sequence: Synthetic oligonucleotide"
ccaacaaaaccactcggagac

SEQ ID NO: 36680 - DNA, 21 bp, Artificial Sequence
  source: /note="Description of Artificial Sequence: Synthetic oligonucleotide"
ccaacactcgacgacccaaaa

SEQ ID NO: 36681 - DNA, 21 bp, Artificial Sequence
  source: /note="Description of Artificial Sequence: Synthetic oligonucleotide"
ccaacactcgacggaaaacca

SEQ ID NO: 36682 - DNA, 21 bp, Artificial Sequence
  source: /note="Description of Artificial Sequence: Synthetic oligonucleotide"
ccaacactcaaaagcgacatg

SEQ ID NO: 36683 - DNA, 21 bp, Artificial Sequence
  source: /note="Description of Artificial Sequence: Synthetic oligonucleotide"
ccaacactcccaagcacagtc

SEQ ID NO: 36684 - DNA, 21 bp, Artificial Sequence
  source: /note="Description of Artificial Sequence: Synthetic oligonucleotide"
ccaacactcagcatggcacac

SEQ ID NO: 36685 - DNA, 21 bp, Artificial Sequence
  source: /note="Description of Artificial Sequence: Synthetic oligonucleotide"
ccaacactcagcagaacacac

SEQ ID NO: 36686 - DNA, 21 bp, Artificial Sequence
  source: /note="Description of Artificial Sequence: Synthetic oligonucleotide"
ccaacactcagcacactcctc

SEQ ID NO: 36687 - DNA, 21 bp, Artificial Sequence
  source: /note="Description of Artificial Sequence: Synthetic oligonucleotide"
ccaacaatgcacatgctcagc

SEQ ID NO: 36688 - DNA, 21 bp, Artificial Sequence
  source: /note="Description of Artificial Sequence: Synthetic oligonucleotide"
ccaacaatgaacagaaacgaa

SEQ ID NO: 36689 - DNA, 21 bp, Artificial Sequence
  source: /note="Description of Artificial Sequence: Synthetic oligonucleotide"
ccaacaatgagcgacagcaga

SEQ ID NO: 36690 - DNA, 21 bp, Artificial Sequence
  source: /note="Description of Artificial Sequence: Synthetic oligonucleotide"
ccaacaaacgcactccacctc

SEQ ID NO: 36691 - DNA, 21 bp, Artificial Sequence
  source: /note="Description of Artificial Sequence: Synthetic oligonucleotide"
ccaacaaacgcagtcgacaac

SEQ ID NO: 36692 - DNA, 21 bp, Artificial Sequence
  source: /note="Description of Artificial Sequence: Synthetic oligonucleotide"
ccaacaaacctcggaagagca

SEQ ID NO: 36693 - DNA, 21 bp, Artificial Sequence
  source: /note="Description of Artificial Sequence: Synthetic oligonucleotide"
ccaacaaacccaagactcatg

SEQ ID NO: 36694 - DNA, 21 bp, Artificial Sequence
  source: /note="Description of Artificial Sequence: Synthetic oligonucleotide"
ccaacaaacagaccaagcagc

SEQ ID NO: 36695 - DNA, 21 bp, Artificial Sequence
  source: /note="Description of Artificial Sequence: Synthetic oligonucleotide"
ccaacaccagcagcacacgga

SEQ ID NO: 36696 - DNA, 21 bp, Artificial Sequence
  source: /note="Description of Artificial Sequence: Synthetic oligonucleotide"
ccaacaccaccaacagtcaca

SEQ ID NO: 36697 - DNA, 21 bp, Artificial Sequence
  source: /note="Description of Artificial Sequence: Synthetic oligonucleotide"
ccaacaccacaaggaagcgca

SEQ ID NO: 36698 - DNA, 21 bp, Artificial Sequence
  source: /note="Description of Artificial Sequence: Synthetic oligonucleotide"
ccaacaccaagaccaagccca

SEQ ID NO: 36699 - DNA, 21 bp, Artificial Sequence
  source: /note="Description of Artificial Sequence: Synthetic oligonucleotide"
ccaacaccaagaagcgtccca

SEQ ID NO: 36700 - DNA, 21 bp, Artificial Sequence
  source: /note="Description of Artificial Sequence: Synthetic oligonucleotide"
ccaacacaaagcggagtcagc

SEQ ID NO: 36701 - DNA, 21 bp, Artificial Sequence
  source: /note="Description of Artificial Sequence: Synthetic oligonucleotide"
ccaacaagagcagaattctac

SEQ ID NO: 36702 - DNA, 21 bp, Artificial Sequence
  source: /note="Description of Artificial Sequence: Synthetic oligonucleotide"
ccaacaagacaaccagtcctc

SEQ ID NO: 36703 - DNA, 21 bp, Artificial Sequence
  source: /note="Description of Artificial Sequence: Synthetic oligonucleotide"
ccaacaagaacaatcaacgca

SEQ ID NO: 36704 - DNA, 21 bp, Artificial Sequence
  source: /note="Description of Artificial Sequence: Synthetic oligonucleotide"
ccaacaagaacaccagcaagc

SEQ ID NO: 36705 - DNA, 21 bp, Artificial Sequence
  source: /note="Description of Artificial Sequence: Synthetic oligonucleotide"
ccaacaagcgacttcaaatgc

SEQ ID NO: 36706 - DNA, 21 bp, Artificial Sequence
  source: /note="Description of Artificial Sequence: Synthetic oligonucleotide"
ccaacaagcgaagcactcaga

SEQ ID NO: 36707 - DNA, 21 bp, Artificial Sequence
  source: /note="Description of Artificial Sequence: Synthetic oligonucleotide"
ccaacaagcatccacagaaac

SEQ ID NO: 36708 - DNA, 21 bp, Artificial Sequence
  source: /note="Description of Artificial Sequence: Synthetic oligonucleotide"
ccaacaagcatcgtcagaagc

SEQ ID NO: 36709 - DNA, 21 bp, Artificial Sequence
  source: /note="Description of Artificial Sequence: Synthetic oligonucleotide"
ccaacaagcaaaggaccactc

SEQ ID NO: 36710 - DNA, 21 bp, Artificial Sequence
  source: /note="Description of Artificial Sequence: Synthetic oligonucleotide"
ccaacaagcccaacagacatg

SEQ ID NO: 36711 - DNA, 21 bp, Artificial Sequence
  source: /note="Description of Artificial Sequence: Synthetic oligonucleotide"
ccaacaagcccaacaacatgc

SEQ ID NO: 36712 - DNA, 21 bp, Artificial Sequence
  source: /note="Description of Artificial Sequence: Synthetic oligonucleotide"
ccaacaagcagaccaagcctc

SEQ ID NO: 36713 - DNA, 21 bp, Artificial Sequence
  source: /note="Description of Artificial Sequence: Synthetic oligonucleotide"
ccaacaagcagcatcggagga

SEQ ID NO: 36714 - DNA, 21 bp, Artificial Sequence
  source: /note="Description of Artificial Sequence: Synthetic oligonucleotide"
ccaacaagcacaaacccactc

SEQ ID NO: 36715 - DNA, 21 bp, Artificial Sequence
  source: /note="Description of Artificial Sequence: Synthetic oligonucleotide"
ccaacaagcgtcggaacagga

SEQ ID NO: 36716 - DNA, 21 bp, Artificial Sequence
  source: /note="Description of Artificial Sequence: Synthetic oligonucleotide"
ccaacaagcgtcccaaaaaca

SEQ ID NO: 36717 - DNA, 21 bp, Artificial Sequence
  source: /note="Description of Artificial Sequence: Synthetic oligonucleotide"
ccaacaacacacctcagcgac

SEQ ID NO: 36718 - DNA, 21 bp, Artificial Sequence
  source: /note="Description of Artificial Sequence: Synthetic oligonucleotide"
ccaacaacacacagcgcaaga

SEQ ID NO: 36719 - DNA, 21 bp, Artificial Sequence
  source: /note="Description of Artificial Sequence: Synthetic oligonucleotide"
ccaacaacactcgcagtcgca

SEQ ID NO: 36720 - DNA, 21 bp, Artificial Sequence
  source: /note="Description of Artificial Sequence: Synthetic oligonucleotide"
ccaacaacaaacggaagcaca

SEQ ID NO: 36721 - DNA, 21 bp, Artificial Sequence
  source: /note="Description of Artificial Sequence: Synthetic oligonucleotide"
ccaacaacaccagtcgcaatc

SEQ ID NO: 36722 - DNA, 21 bp, Artificial Sequence
  source: /note="Description of Artificial Sequence: Synthetic oligonucleotide"
ccaacaacaagaggaccacca

SEQ ID NO: 36723 - DNA, 21 bp, Artificial Sequence
  source: /note="Description of Artificial Sequence: Synthetic oligonucleotide"
ccaacagtcaaactcctcgga

SEQ ID NO: 36724 - DNA, 21 bp, Artificial Sequence
  source: /note="Description of Artificial Sequence: Synthetic oligonucleotide"
ccaacagtcccagacctcaac

SEQ ID NO: 36725 - DNA, 21 bp, Artificial Sequence
  source: /note="Description of Artificial Sequence: Synthetic oligonucleotide"
ccaacagtcccaagaccagga

SEQ ID NO: 36726 - DNA, 21 bp, Artificial Sequence
  source: /note="Description of Artificial Sequence: Synthetic oligonucleotide"
ccaacagtcccagtcggactc

SEQ ID NO: 36727 - DNA, 21 bp, Artificial Sequence
  source: /note="Description of Artificial Sequence: Synthetic oligonucleotide"
ccaacagtcagaggacaatac

SEQ ID NO: 36728 - DNA, 21 bp, Artificial Sequence
  source: /note="Description of Artificial Sequence: Synthetic oligonucleotide"
ccaacatacccaaaagcaaca

SEQ ID NO: 36729 - DNA, 21 bp, Artificial Sequence
  source: /note="Description of Artificial Sequence: Synthetic oligonucleotide"
ccaacatacagagacacagca

SEQ ID NO: 36730 - DNA, 21 bp, Artificial Sequence
  source: /note="Description of Artificial Sequence: Synthetic oligonucleotide"
ccagtcgcaagaagcatgagc

SEQ ID NO: 36731 - DNA, 21 bp, Artificial Sequence
  source: /note="Description of Artificial Sequence: Synthetic oligonucleotide"
ccagtcgcaacatgcagagtc

SEQ ID NO: 36732 - DNA, 21 bp, Artificial Sequence
  source: /note="Description of Artificial Sequence: Synthetic oligonucleotide"
ccagtcgcaacaagctacgac

SEQ ID NO: 36733 - DNA, 21 bp, Artificial Sequence
  source: /note="Description of Artificial Sequence: Synthetic oligonucleotide"
ccagtcgacgcactcccaaga

SEQ ID NO: 36734 - DNA, 21 bp, Artificial Sequence
  source: /note="Description of Artificial Sequence: Synthetic oligonucleotide"
ccagtcgaccacgcaagaagc

SEQ ID NO: 36735 - DNA, 21 bp, Artificial Sequence
  source: /note="Description of Artificial Sequence: Synthetic oligonucleotide"
ccagtcgacctcggaagagga

SEQ ID NO: 36736 - DNA, 21 bp, Artificial Sequence
  source: /note="Description of Artificial Sequence: Synthetic oligonucleotide"
ccagtcgaagcaacagtcctc

SEQ ID NO: 36737 - DNA, 21 bp, Artificial Sequence
  source: /note="Description of Artificial Sequence: Synthetic oligonucleotide"
ccagtcgaaaaatacgacaaa

SEQ ID NO: 36738 - DNA, 21 bp, Artificial Sequence
  source: /note="Description of Artificial Sequence: Synthetic oligonucleotide"
ccagtcgaaccaggaatgagc

SEQ ID NO: 36739 - DNA, 21 bp, Artificial Sequence
  source: /note="Description of Artificial Sequence: Synthetic oligonucleotide"
ccagtcgaaagccacagactc

SEQ ID NO: 36740 - DNA, 21 bp, Artificial Sequence
  source: /note="Description of Artificial Sequence: Synthetic oligonucleotide"
ccagtcttccacgaagcaagc

SEQ ID NO: 36741 - DNA, 21 bp, Artificial Sequence
  source: /note="Description of Artificial Sequence: Synthetic oligonucleotide"
ccagtcttcccacaaagcagc

SEQ ID NO: 36742 - DNA, 21 bp, Artificial Sequence
  source: /note="Description of Artificial Sequence: Synthetic oligonucleotide"
ccagtcggattcacagaaaac

SEQ ID NO: 36743 - DNA, 21 bp, Artificial Sequence
  source: /note="Description of Artificial Sequence: Synthetic oligonucleotide"
ccagtcggaagcaacagcgca

SEQ ID NO: 36744 - DNA, 21 bp, Artificial Sequence
  source: /note="Description of Artificial Sequence: Synthetic oligonucleotide"
ccagtccacatccacacaagc

SEQ ID NO: 36745 - DNA, 21 bp, Artificial Sequence
  source: /note="Description of Artificial Sequence: Synthetic oligonucleotide"
ccagtccacagcggaagacca

SEQ ID NO: 36746 - DNA, 21 bp, Artificial Sequence
  source: /note="Description of Artificial Sequence: Synthetic oligonucleotide"
ccagtcatcagcacaatcgca

SEQ ID NO: 36747 - DNA, 21 bp, Artificial Sequence
  source: /note="Description of Artificial Sequence: Synthetic oligonucleotide"
ccagtcaaagaagtcggagac

SEQ ID NO: 36748 - DNA, 21 bp, Artificial Sequence
  source: /note="Description of Artificial Sequence: Synthetic oligonucleotide"
ccagtcaaaagcgcagcacca

SEQ ID NO: 36749 - DNA, 21 bp, Artificial Sequence
  source: /note="Description of Artificial Sequence: Synthetic oligonucleotide"
ccagtcctcccaagcgaccac

SEQ ID NO: 36750 - DNA, 21 bp, Artificial Sequence
  source: /note="Description of Artificial Sequence: Synthetic oligonucleotide"
ccagtcatgggaacaagcgtc

SEQ ID NO: 36751 - DNA, 21 bp, Artificial Sequence
  source: /note="Description of Artificial Sequence: Synthetic oligonucleotide"
ccagtcatgagcggagcaagc

SEQ ID NO: 36752 - DNA, 21 bp, Artificial Sequence
  source: /note="Description of Artificial Sequence: Synthetic oligonucleotide"
ccagtcaacagcgaaagaatg

SEQ ID NO: 36753 - DNA, 21 bp, Artificial Sequence
  source: /note="Description of Artificial Sequence: Synthetic oligonucleotide"
ccagtcccaggaaaactcgca

SEQ ID NO: 36754 - DNA, 21 bp, Artificial Sequence
  source: /note="Description of Artificial Sequence: Synthetic oligonucleotide"
ccagtcccaccaccactcaga

SEQ ID NO: 36755 - DNA, 21 bp, Artificial Sequence
  source: /note="Description of Artificial Sequence: Synthetic oligonucleotide"
ccagtcccaagaagcgtcaac

SEQ ID NO: 36756 - DNA, 21 bp, Artificial Sequence
  source: /note="Description of Artificial Sequence: Synthetic oligonucleotide"
ccagtccaaatgacagcaagc

SEQ ID NO: 36757 - DNA, 21 bp, Artificial Sequence
  source: /note="Description of Artificial Sequence: Synthetic oligonucleotide"
ccagtccaagtcagcctcgga

SEQ ID NO: 36758 - DNA, 21 bp, Artificial Sequence
  source: /note="Description of Artificial Sequence: Synthetic oligonucleotide"
ccagtcagagcaatcgaacac

SEQ ID NO: 36759 - DNA, 21 bp, Artificial Sequence
  source: /note="Description of Artificial Sequence: Synthetic oligonucleotide"
ccagtcagagcaatggacgga

SEQ ID NO: 36760 - DNA, 21 bp, Artificial Sequence
  source: /note="Description of Artificial Sequence: Synthetic oligonucleotide"
ccagtcagcggaaacttcaca

SEQ ID NO: 36761 - DNA, 21 bp, Artificial Sequence
  source: /note="Description of Artificial Sequence: Synthetic oligonucleotide"
ccagtcagcaaagacagacca

SEQ ID NO: 36762 - DNA, 21 bp, Artificial Sequence
  source: /note="Description of Artificial Sequence: Synthetic oligonucleotide"
ccagtcagcatggcagcaaga

SEQ ID NO: 36763 - DNA, 21 bp, Artificial Sequence
  source: /note="Description of Artificial Sequence: Synthetic oligonucleotide"
ccagtcagcatgccaagagaa

SEQ ID NO: 36764 - DNA, 21 bp, Artificial Sequence
  source: /note="Description of Artificial Sequence: Synthetic oligonucleotide"
ccagtcagcccagcaatccca

SEQ ID NO: 36765 - DNA, 21 bp, Artificial Sequence
  source: /note="Description of Artificial Sequence: Synthetic oligonucleotide"
ccagtcagcccagtcccagca

SEQ ID NO: 36766 - DNA, 21 bp, Artificial Sequence
  source: /note="Description of Artificial Sequence: Synthetic oligonucleotide"
ccagtcagccaacacagcaaa

SEQ ID NO: 36767 - DNA, 21 bp, Artificial Sequence
  source: /note="Description of Artificial Sequence: Synthetic oligonucleotide"
ccagtcagcagcccaacaatg

SEQ ID NO: 36768 - DNA, 21 bp, Artificial Sequence
  source: /note="Description of Artificial Sequence: Synthetic oligonucleotide"
ccagtcagcacaagcgcagac

SEQ ID NO: 36769 - DNA, 21 bp, Artificial Sequence
  source: /note="Description of Artificial Sequence: Synthetic oligonucleotide"
ccagtcacagcaggagaaaga

SEQ ID NO: 36770 - DNA, 21 bp, Artificial Sequence
  source: /note="Description of Artificial Sequence: Synthetic oligonucleotide"
ccagtcacaggaccaggacaa

SEQ ID NO: 36771 - DNA, 21 bp, Artificial Sequence
  source: /note="Description of Artificial Sequence: Synthetic oligonucleotide"
ccagtcacaaaaagcctcctc

SEQ ID NO: 36772 - DNA, 21 bp, Artificial Sequence
  source: /note="Description of Artificial Sequence: Synthetic oligonucleotide"
ccagtcacaaaaagcgtcctc

SEQ ID NO: 36773 - DNA, 21 bp, Artificial Sequence
  source: /note="Description of Artificial Sequence: Synthetic oligonucleotide"
ccagtcacaaacgacagacac

SEQ ID NO: 36774 - DNA, 21 bp, Artificial Sequence
  source: /note="Description of Artificial Sequence: Synthetic oligonucleotide"
ccagtcacaacaaacgcagga

SEQ ID NO: 36775 - DNA, 21 bp, Artificial Sequence
  source: /note="Description of Artificial Sequence: Synthetic oligonucleotide"
ccagtcgtcaacgtctggagc

SEQ ID NO: 36776 - DNA, 21 bp, Artificial Sequence
  source: /note="Description of Artificial Sequence: Synthetic oligonucleotide"
ccagtcgtcagcgacacactc

SEQ ID NO: 36777 - DNA, 21 bp, Artificial Sequence
  source: /note="Description of Artificial Sequence: Synthetic oligonucleotide"
ccagtcgtcacaacaacactc

SEQ ID NO: 36778 - DNA, 21 bp, Artificial Sequence
  source: /note="Description of Artificial Sequence: Synthetic oligonucleotide"
ccagtctacgtcggagaaatc

SEQ ID NO: 36779 - DNA, 21 bp, Artificial Sequence
  source: /note="Description of Artificial Sequence: Synthetic oligonucleotide"
ccatgggcaacaatgcaagga

SEQ ID NO: 36780 - DNA, 21 bp, Artificial Sequence
  source: /note="Description of Artificial Sequence: Synthetic oligonucleotide"
ccatggaaagacaacagagga

SEQ ID NO: 36781 - DNA, 21 bp, Artificial Sequence
  source: /note="Description of Artificial Sequence: Synthetic oligonucleotide"
ccatggagcgaagacggaatg

SEQ ID NO: 36782 - DNA, 21 bp, Artificial Sequence
  source: /note="Description of Artificial Sequence: Synthetic oligonucleotide"
ccatacgcaacagcactcaca

SEQ ID NO: 36783 - DNA, 21 bp, Artificial Sequence
  source: /note="Description of Artificial Sequence: Synthetic oligonucleotide"
ccatacgacagaccaagcgca

SEQ ID NO: 36784 - DNA, 21 bp, Artificial Sequence
  source: /note="Description of Artificial Sequence: Synthetic oligonucleotide"
ccatacgaagcaagagcactc

SEQ ID NO: 36785 - DNA, 21 bp, Artificial Sequence
  source: /note="Description of Artificial Sequence: Synthetic oligonucleotide"
ccatacgaaatggtcgcaatg

SEQ ID NO: 36786 - DNA, 21 bp, Artificial Sequence
  source: /note="Description of Artificial Sequence: Synthetic oligonucleotide"
ccatacggaacaagagaaaca

SEQ ID NO: 36787 - DNA, 21 bp, Artificial Sequence
  source: /note="Description of Artificial Sequence: Synthetic oligonucleotide"
ccataccacaaccacagcgca

SEQ ID NO: 36788 - DNA, 21 bp, Artificial Sequence
  source: /note="Description of Artificial Sequence: Synthetic oligonucleotide"
ccatacatcggaggaatgagc

SEQ ID NO: 36789 - DNA, 21 bp, Artificial Sequence
  source: /note="Description of Artificial Sequence: Synthetic oligonucleotide"
ccatacctcgacccactcaga

SEQ ID NO: 36790 - DNA, 21 bp, Artificial Sequence
  source: /note="Description of Artificial Sequence: Synthetic oligonucleotide"
ccatacctcagcaacagacca

SEQ ID NO: 36791 - DNA, 21 bp, Artificial Sequence
  source: /note="Description of Artificial Sequence: Synthetic oligonucleotide"
ccatacctctacccagaagaa

SEQ ID NO: 36792 - DNA, 21 bp, Artificial Sequence
  source: /note="Description of Artificial Sequence: Synthetic oligonucleotide"
ccatacccagacccaagcaaa

SEQ ID NO: 36793 - DNA, 21 bp, Artificial Sequence
  source: /note="Description of Artificial Sequence: Synthetic oligonucleotide"
ccatacccagaaacaagccac

SEQ ID NO: 36794 - DNA, 21 bp, Artificial Sequence
  source: /note="Description of Artificial Sequence: Synthetic oligonucleotide"
ccatacccaagcgacaaattc

SEQ ID NO: 36795 - DNA, 21 bp, Artificial Sequence
  source: /note="Description of Artificial Sequence: Synthetic oligonucleotide"
ccatacccaacaagcaacgaa

SEQ ID NO: 36796 - DNA, 21 bp, Artificial Sequence
  source: /note="Description of Artificial Sequence: Synthetic oligonucleotide"
ccataccaaagaaacagcgtc

SEQ ID NO: 36797 - DNA, 21 bp, Artificial Sequence
  source: /note="Description of Artificial Sequence: Synthetic oligonucleotide"
ccatacagagaacacacagtc

SEQ ID NO: 36798 - DNA, 21 bp, Artificial Sequence
  source: /note="Description of Artificial Sequence: Synthetic oligonucleotide"
ccatacagagaaagcagccca

SEQ ID NO: 36799 - DNA, 21 bp, Artificial Sequence
  source: /note="Description of Artificial Sequence: Synthetic oligonucleotide"
ccatacagaagcgaaccagca

SEQ ID NO: 36800 - DNA, 21 bp, Artificial Sequence
  source: /note="Description of Artificial Sequence: Synthetic oligonucleotide"
ccatacagcgcaggataccac

SEQ ID NO: 36801 - DNA, 21 bp, Artificial Sequence
  source: /note="Description of Artificial Sequence: Synthetic oligonucleotide"
ccatacagcggaatgacactc

SEQ ID NO: 36802 - DNA, 21 bp, Artificial Sequence
  source: /note="Description of Artificial Sequence: Synthetic oligonucleotide"
ccatacagcgtcgcagtcagc

SEQ ID NO: 36803 - DNA, 21 bp, Artificial Sequence
  source: /note="Description of Artificial Sequence: Synthetic oligonucleotide"
ccatacacaagcgcactcctc

SEQ ID NO: 36804 - DNA, 21 bp, Artificial Sequence
  source: /note="Description of Artificial Sequence: Synthetic oligonucleotide"
ccatacgtcacagacagagtc

SEQ ID NO: 36805 - DNA, 21 bp, Artificial Sequence
  source: /note="Description of Artificial Sequence: Synthetic oligonucleotide"
ccatacgtcacagaagtctac

SEQ ID NO: 36806 - DNA, 21 bp, Artificial Sequence
  source: /note="Description of Artificial Sequence: Synthetic oligonucleotide"
caagcagcaagcctcctcgca

SEQ ID NO: 36807 - DNA, 21 bp, Artificial Sequence
  source: /note="Description of Artificial Sequence: Synthetic oligonucleotide"
caagcagaactcccatacgga

SEQ ID NO: 36808 - DNA, 21 bp, Artificial Sequence
  source: /note="Description of Artificial Sequence: Synthetic oligonucleotide"
caagcattcgacgtcgaaatg

SEQ ID NO: 36809 - DNA, 21 bp, Artificial Sequence
  source: /note="Description of Artificial Sequence: Synthetic oligonucleotide"
caagcaggaatgcaaggagca

SEQ ID NO: 36810 - DNA, 21 bp, Artificial Sequence
  source: /note="Description of Artificial Sequence: Synthetic oligonucleotide"
caagcaggaaacctcagagac

SEQ ID NO: 36811 - DNA, 21 bp, Artificial Sequence
  source: /note="Description of Artificial Sequence: Synthetic oligonucleotide"
caagcaggaaacaacggagca

SEQ ID NO: 36812 - DNA, 21 bp, Artificial Sequence
  source: /note="Description of Artificial Sequence: Synthetic oligonucleotide"
caagcaggagtcacaaacagc

SEQ ID NO: 36813 - DNA, 21 bp, Artificial Sequence
  source: /note="Description of Artificial Sequence: Synthetic oligonucleotide"
caagcacacggaggagcactc

SEQ ID NO: 36814 - DNA, 21 bp, Artificial Sequence
  source: /note="Description of Artificial Sequence: Synthetic oligonucleotide"
caagcaatccaacaaagacaa

SEQ ID NO: 36815 - DNA, 21 bp, Artificial Sequence
  source: /note="Description of Artificial Sequence: Synthetic oligonucleotide"
caagcaatcagaaacgaacca

SEQ ID NO: 36816 - DNA, 21 bp, Artificial Sequence
  source: /note="Description of Artificial Sequence: Synthetic oligonucleotide"
caagcaaaagcatacgcaaca

SEQ ID NO: 36817 - DNA, 21 bp, Artificial Sequence
  source: /note="Description of Artificial Sequence: Synthetic oligonucleotide"
caagcaaaaagcccaagcctc

SEQ ID NO: 36818 - DNA, 21 bp, Artificial Sequence
  source: /note="Description of Artificial Sequence: Synthetic oligonucleotide"
caagcactcgcaccaacaaac

SEQ ID NO: 36819 - DNA, 21 bp, Artificial Sequence
  source: /note="Description of Artificial Sequence: Synthetic oligonucleotide"
caagcactcccaacaatgcac

SEQ ID NO: 36820 - DNA, 21 bp, Artificial Sequence
  source: /note="Description of Artificial Sequence: Synthetic oligonucleotide"
caagcaaacggaagcgtcgga

SEQ ID NO: 36821 - DNA, 21 bp, Artificial Sequence
  source: /note="Description of Artificial Sequence: Synthetic oligonucleotide"
caagcaaacgtcagccaacca

SEQ ID NO: 36822 - DNA, 21 bp, Artificial Sequence
  source: /note="Description of Artificial Sequence: Synthetic oligonucleotide"
caagcaccaggacacagagaa

SEQ ID NO: 36823 - DNA, 21 bp, Artificial Sequence
  source: /note="Description of Artificial Sequence: Synthetic oligonucleotide"
caagcaccaggaatcctcctc

SEQ ID NO: 36824 - DNA, 21 bp, Artificial Sequence
  source: /note="Description of Artificial Sequence: Synthetic oligonucleotide"
caagcaccaggactcctcgtc

SEQ ID NO: 36825 - DNA, 21 bp, Artificial Sequence
  source: /note="Description of Artificial Sequence: Synthetic oligonucleotide"
caagcaccactcgcaagcctc

SEQ ID NO: 36826 - DNA, 21 bp, Artificial Sequence
  source: /note="Description of Artificial Sequence: Synthetic oligonucleotide"
caagcaccaagaagcgacgtc

SEQ ID NO: 36827 - DNA, 21 bp, Artificial Sequence
  source: /note="Description of Artificial Sequence: Synthetic oligonucleotide"
caagcacaactccaaggaaga

SEQ ID NO: 36828 - DNA, 21 bp, Artificial Sequence
  source: /note="Description of Artificial Sequence: Synthetic oligonucleotide"
caagcacaaagagcactcagc

SEQ ID NO: 36829 - DNA, 21 bp, Artificial Sequence
  source: /note="Description of Artificial Sequence: Synthetic oligonucleotide"
caagcacaatacccagcaatg

SEQ ID NO: 36830 - DNA, 21 bp, Artificial Sequence
  source: /note="Description of Artificial Sequence: Synthetic oligonucleotide"
caagcaagagcagtcacaagc

SEQ ID NO: 36831 - DNA, 21 bp, Artificial Sequence
  source: /note="Description of Artificial Sequence: Synthetic oligonucleotide"
caagcaagagacccaagcctc

SEQ ID NO: 36832 - DNA, 21 bp, Artificial Sequence
  source: /note="Description of Artificial Sequence: Synthetic oligonucleotide"
caagcaagagaagtcagccca

SEQ ID NO: 36833 - DNA, 21 bp, Artificial Sequence
  source: /note="Description of Artificial Sequence: Synthetic oligonucleotide"
caagcaagaggaaacgtcagc

SEQ ID NO: 36834 - DNA, 21 bp, Artificial Sequence
  source: /note="Description of Artificial Sequence: Synthetic oligonucleotide"
caagcaagaaacacaagcctc

SEQ ID NO: 36835 - DNA, 21 bp, Artificial Sequence
  source: /note="Description of Artificial Sequence: Synthetic oligonucleotide"
caagcaagaccaggaatcctc

SEQ ID NO: 36836 - DNA, 21 bp, Artificial Sequence
  source: /note="Description of Artificial Sequence: Synthetic oligonucleotide"
caagcaagagtcttcgacagc

SEQ ID NO: 36837 - DNA, 21 bp, Artificial Sequence
  source: /note="Description of Artificial Sequence: Synthetic oligonucleotide"
caagcaagcgcaaacagagca

SEQ ID NO: 36838 - DNA, 21 bp, Artificial Sequence
  source: /note="Description of Artificial Sequence: Synthetic oligonucleotide"
caagcaagcatcatcagagca

SEQ ID NO: 36839 - DNA, 21 bp, Artificial Sequence
  source: /note="Description of Artificial Sequence: Synthetic oligonucleotide"
caagcaagcaaactcccaagc

SEQ ID NO: 36840 - DNA, 21 bp, Artificial Sequence
  source: /note="Description of Artificial Sequence: Synthetic oligonucleotide"
caagcaagcccagcatacgga

SEQ ID NO: 36841 - DNA, 21 bp, Artificial Sequence
  source: /note="Description of Artificial Sequence: Synthetic oligonucleotide"
caagcaagccaaagcctcagc

SEQ ID NO: 36842 - DNA, 21 bp, Artificial Sequence
  source: /note="Description of Artificial Sequence: Synthetic oligonucleotide"
caagcaacagcaaacagcctc

SEQ ID NO: 36843 - DNA, 21 bp, Artificial Sequence
  source: /note="Description of Artificial Sequence: Synthetic oligonucleotide"
caagcaacattcggagacgac

SEQ ID NO: 36844 - DNA, 21 bp, Artificial Sequence
  source: /note="Description of Artificial Sequence: Synthetic oligonucleotide"
caagcaacaaaccaaagcctc

SEQ ID NO: 36845 - DNA, 21 bp, Artificial Sequence
  source: /note="Description of Artificial Sequence: Synthetic oligonucleotide"
caagcaacaccactcacaaca

SEQ ID NO: 36846 - DNA, 21 bp, Artificial Sequence
  source: /note="Description of Artificial Sequence: Synthetic oligonucleotide"
caagcaacacaactcggacac

SEQ ID NO: 36847 - DNA, 21 bp, Artificial Sequence
  source: /note="Description of Artificial Sequence: Synthetic oligonucleotide"
caagcagtcagagacaaagac

SEQ ID NO: 36848 - DNA, 21 bp, Artificial Sequence
  source: /note="Description of Artificial Sequence: Synthetic oligonucleotide"
caagcagtcagaccagacagc

SEQ ID NO: 36849 - DNA, 21 bp, Artificial Sequence
  source: /note="Description of Artificial Sequence: Synthetic oligonucleotide"
caagcataccacaacagcctc

SEQ ID NO: 36850 - DNA, 21 bp, Artificial Sequence
  source: /note="Description of Artificial Sequence: Synthetic oligonucleotide"
caagcatacgtcaacagcctc

SEQ ID NO: 36851 - DNA, 21 bp, Artificial Sequence
  source: /note="Description of Artificial Sequence: Synthetic oligonucleotide"
caatgcagcgacagaagagca

SEQ ID NO: 36852 - DNA, 21 bp, Artificial Sequence
  source: /note="Description of Artificial Sequence: Synthetic oligonucleotide"
caagacgcagacccagcacac

SEQ ID NO: 36853 - DNA, 21 bp, Artificial Sequence
  source: /note="Description of Artificial Sequence: Synthetic oligonucleotide"
caagacgacttcagaagcaaa

SEQ ID NO: 36854 - DNA, 21 bp, Artificial Sequence
  source: /note="Description of Artificial Sequence: Synthetic oligonucleotide"
caagacgacgtccaaaaactc

SEQ ID NO: 36855 - DNA, 21 bp, Artificial Sequence
  source: /note="Description of Artificial Sequence: Synthetic oligonucleotide"
caagacttcgacgacgtccac

SEQ ID NO: 36856 - DNA, 21 bp, Artificial Sequence
  source: /note="Description of Artificial Sequence: Synthetic oligonucleotide"
caagacggaatcagaatcatg

SEQ ID NO: 36857 - DNA, 21 bp, Artificial Sequence
  source: /note="Description of Artificial Sequence: Synthetic oligonucleotide"
caagacatcagagcattcgca

SEQ ID NO: 36858 - DNA, 21 bp, Artificial Sequence
  source: /note="Description of Artificial Sequence: Synthetic oligonucleotide"
caagacagagcactccaacca

SEQ ID NO: 36859 - DNA, 21 bp, Artificial Sequence
  source: /note="Description of Artificial Sequence: Synthetic oligonucleotide"
caagacagactcgcagacaca

SEQ ID NO: 36860 - DNA, 21 bp, Artificial Sequence
  source: /note="Description of Artificial Sequence: Synthetic oligonucleotide"
caagacagaatgagcctcaga

SEQ ID NO: 36861 - DNA, 21 bp, Artificial Sequence
  source: /note="Description of Artificial Sequence: Synthetic oligonucleotide"
caagacagaagcacaaacttc

SEQ ID NO: 36862 - DNA, 21 bp, Artificial Sequence
  source: /note="Description of Artificial Sequence: Synthetic oligonucleotide"
caagacagctgcctcctccca

SEQ ID NO: 36863 - DNA, 21 bp, Artificial Sequence
  source: /note="Description of Artificial Sequence: Synthetic oligonucleotide"
caagacagctacctcggatac

SEQ ID NO: 36864 - DNA, 21 bp, Artificial Sequence
  source: /note="Description of Artificial Sequence: Synthetic oligonucleotide"
caagacacactcacaagattc

SEQ ID NO: 36865 - DNA, 21 bp, Artificial Sequence
  source: /note="Description of Artificial Sequence: Synthetic oligonucleotide"
caagacacaacaagcctcgac

SEQ ID NO: 36866 - DNA, 21 bp, Artificial Sequence
  source: /note="Description of Artificial Sequence: Synthetic oligonucleotide"
caagacacatacacacacaaa

SEQ ID NO: 36867 - DNA, 21 bp, Artificial Sequence
  source: /note="Description of Artificial Sequence: Synthetic oligonucleotide"
caagacgtcggactcacagtc

SEQ ID NO: 36868 - DNA, 21 bp, Artificial Sequence
  source: /note="Description of Artificial Sequence: Synthetic oligonucleotide"
caagacgtcccaagctgcgga

SEQ ID NO: 36869 - DNA, 21 bp, Artificial Sequence
  source: /note="Description of Artificial Sequence: Synthetic oligonucleotide"
caagactacaaaaaaccaagc

SEQ ID NO: 36870 - DNA, 21 bp, Artificial Sequence
  source: /note="Description of Artificial Sequence: Synthetic oligonucleotide"
caagactacagactcccagaa

SEQ ID NO: 36871 - DNA, 21 bp, Artificial Sequence
  source: /note="Description of Artificial Sequence: Synthetic oligonucleotide"
caagaagcagcaagagtcgaa

SEQ ID NO: 36872 - DNA, 21 bp, Artificial Sequence
  source: /note="Description of Artificial Sequence: Synthetic oligonucleotide"
caagaagacacatggagcgga

SEQ ID NO: 36873 - DNA, 21 bp, Artificial Sequence
  source: /note="Description of Artificial Sequence: Synthetic oligonucleotide"
caagaaggagcagtcatgaac

SEQ ID NO: 36874 - DNA, 21 bp, Artificial Sequence
  source: /note="Description of Artificial Sequence: Synthetic oligonucleotide"
caagaactcctcaaaggatac

SEQ ID NO: 36875 - DNA, 21 bp, Artificial Sequence
  source: /note="Description of Artificial Sequence: Synthetic oligonucleotide"
caagaactcgtcctcacaaga

SEQ ID NO: 36876 - DNA, 21 bp, Artificial Sequence
  source: /note="Description of Artificial Sequence: Synthetic oligonucleotide"
caagaaccagcagtcagcatc

SEQ ID NO: 36877 - DNA, 21 bp, Artificial Sequence
  source: /note="Description of Artificial Sequence: Synthetic oligonucleotide"
caagaaccaatgagcggagca

SEQ ID NO: 36878 - DNA, 21 bp, Artificial Sequence
  source: /note="Description of Artificial Sequence: Synthetic oligonucleotide"
caagaaccaagaggaatgcac

SEQ ID NO: 36879 - DNA, 21 bp, Artificial Sequence
  source: /note="Description of Artificial Sequence: Synthetic oligonucleotide"
caagaaagaagaatgggacca

SEQ ID NO: 36880 - DNA, 21 bp, Artificial Sequence
  source: /note="Description of Artificial Sequence: Synthetic oligonucleotide"
caagaaagcagccacggacca

SEQ ID NO: 36881 - DNA, 21 bp, Artificial Sequence
  source: /note="Description of Artificial Sequence: Synthetic oligonucleotide"
caagaaagcacaggagtctgg

SEQ ID NO: 36882 - DNA, 21 bp, Artificial Sequence
  source: /note="Description of Artificial Sequence: Synthetic oligonucleotide"
caagaagtcgcaaacaaccca

SEQ ID NO: 36883 - DNA, 21 bp, Artificial Sequence
  source: /note="Description of Artificial Sequence: Synthetic oligonucleotide"
caagaagtccacatcacagga

SEQ ID NO: 36884 - DNA, 21 bp, Artificial Sequence
  source: /note="Description of Artificial Sequence: Synthetic oligonucleotide"
caagaagtcccaggaagaatc

SEQ ID NO: 36885 - DNA, 21 bp, Artificial Sequence
  source: /note="Description of Artificial Sequence: Synthetic oligonucleotide"
caagaatggaacgcaacagca

SEQ ID NO: 36886 - DNA, 21 bp, Artificial Sequence
  source: /note="Description of Artificial Sequence: Synthetic oligonucleotide"
caagaatacgtcagcaaaagc

SEQ ID NO: 36887 - DNA, 21 bp, Artificial Sequence
  source: /note="Description of Artificial Sequence: Synthetic oligonucleotide"
caattcgacaaaatgatgcca

SEQ ID NO: 36888 - DNA, 21 bp, Artificial Sequence
  source: /note="Description of Artificial Sequence: Synthetic oligonucleotide"
caattcgacctcagcccagca

SEQ ID NO: 36889 - DNA, 21 bp, Artificial Sequence
  source: /note="Description of Artificial Sequence: Synthetic oligonucleotide"
caattcgaaaacgcatgcgtc

SEQ ID NO: 36890 - DNA, 21 bp, Artificial Sequence
  source: /note="Description of Artificial Sequence: Synthetic oligonucleotide"
caattcggaatgccaagagac

SEQ ID NO: 36891 - DNA, 21 bp, Artificial Sequence
  source: /note="Description of Artificial Sequence: Synthetic oligonucleotide"
caattcctcaaacacgaagaa

SEQ ID NO: 36892 - DNA, 21 bp, Artificial Sequence
  source: /note="Description of Artificial Sequence: Synthetic oligonucleotide"
caattcatgggaggagtcaac

SEQ ID NO: 36893 - DNA, 21 bp, Artificial Sequence
  source: /note="Description of Artificial Sequence: Synthetic oligonucleotide"
caattcaacgaaacactcaca

SEQ ID NO: 36894 - DNA, 21 bp, Artificial Sequence
  source: /note="Description of Artificial Sequence: Synthetic oligonucleotide"
caattcaacccaagcatcaga

SEQ ID NO: 36895 - DNA, 21 bp, Artificial Sequence
  source: /note="Description of Artificial Sequence: Synthetic oligonucleotide"
caattcaacagcccaatgcca

SEQ ID NO: 36896 - DNA, 21 bp, Artificial Sequence
  source: /note="Description of Artificial Sequence: Synthetic oligonucleotide"
caattcccaggaagcatgcca

SEQ ID NO: 36897 - DNA, 21 bp, Artificial Sequence
  source: /note="Description of Artificial Sequence: Synthetic oligonucleotide"
caattcccaccagcaaacagc

SEQ ID NO: 36898 - DNA, 21 bp, Artificial Sequence
  source: /note="Description of Artificial Sequence: Synthetic oligonucleotide"
caattccaaagcagccaagca

SEQ ID NO: 36899 - DNA, 21 bp, Artificial Sequence
  source: /note="Description of Artificial Sequence: Synthetic oligonucleotide"
caattcagagcagaaatcaca

SEQ ID NO: 36900 - DNA, 21 bp, Artificial Sequence
  source: /note="Description of Artificial Sequence: Synthetic oligonucleotide"
caattcagcctcaacgcagaa

SEQ ID NO: 36901 - DNA, 21 bp, Artificial Sequence
  source: /note="Description of Artificial Sequence: Synthetic oligonucleotide"
caattcagcccaacaagcaga

SEQ ID NO: 36902 - DNA, 21 bp, Artificial Sequence
  source: /note="Description of Artificial Sequence: Synthetic oligonucleotide"
caattcagcagcggaagccca

SEQ ID NO: 36903 - DNA, 21 bp, Artificial Sequence
  source: /note="Description of Artificial Sequence: Synthetic oligonucleotide"
caaggagcagacagcagactc

SEQ ID NO: 36904 - DNA, 21 bp, Artificial Sequence
  source: /note="Description of Artificial Sequence: Synthetic oligonucleotide"
caaggagaacacttcgcagtc

SEQ ID NO: 36905 - DNA, 21 bp, Artificial Sequence
  source: /note="Description of Artificial Sequence: Synthetic oligonucleotide"
caaggagaaaaaccagacgca

SEQ ID NO: 36906 - DNA, 21 bp, Artificial Sequence
  source: /note="Description of Artificial Sequence: Synthetic oligonucleotide"
caaggaggaagcggaccatac

SEQ ID NO: 36907 - DNA, 21 bp, Artificial Sequence
  source: /note="Description of Artificial Sequence: Synthetic oligonucleotide"
caaggacacgacgacgacatc

SEQ ID NO: 36908 - DNA, 21 bp, Artificial Sequence
  source: /note="Description of Artificial Sequence: Synthetic oligonucleotide"
caaggaatcgaacacagacca

SEQ ID NO: 36909 - DNA, 21 bp, Artificial Sequence
  source: /note="Description of Artificial Sequence: Synthetic oligonucleotide"
caaggaatcacatgcagccca

SEQ ID NO: 36910 - DNA, 21 bp, Artificial Sequence
  source: /note="Description of Artificial Sequence: Synthetic oligonucleotide"
caaggaaaacaactcacagca

SEQ ID NO: 36911 - DNA, 21 bp, Artificial Sequence
  source: /note="Description of Artificial Sequence: Synthetic oligonucleotide"
caaggaaaagtcgaccaaaga

SEQ ID NO: 36912 - DNA, 21 bp, Artificial Sequence
  source: /note="Description of Artificial Sequence: Synthetic oligonucleotide"
caaggactcgtcgcaaacttc

SEQ ID NO: 36913 - DNA, 21 bp, Artificial Sequence
  source: /note="Description of Artificial Sequence: Synthetic oligonucleotide"
caaggaatgagcttcggacca

SEQ ID NO: 36914 - DNA, 21 bp, Artificial Sequence
  source: /note="Description of Artificial Sequence: Synthetic oligonucleotide"
caaggaaacagaagcccacac

SEQ ID NO: 36915 - DNA, 21 bp, Artificial Sequence
  source: /note="Description of Artificial Sequence: Synthetic oligonucleotide"
caaggaccagcaaacgtcgtc

SEQ ID NO: 36916 - DNA, 21 bp, Artificial Sequence
  source: /note="Description of Artificial Sequence: Synthetic oligonucleotide"
caaggaccaccagtcacaaac

SEQ ID NO: 36917 - DNA, 21 bp, Artificial Sequence
  source: /note="Description of Artificial Sequence: Synthetic oligonucleotide"
caaggaccaagagcagcacca

SEQ ID NO: 36918 - DNA, 21 bp, Artificial Sequence
  source: /note="Description of Artificial Sequence: Synthetic oligonucleotide"
caaggaccaagcatgctcaca

SEQ ID NO: 36919 - DNA, 21 bp, Artificial Sequence
  source: /note="Description of Artificial Sequence: Synthetic oligonucleotide"
caaggacaacacccaatgaca

SEQ ID NO: 36920 - DNA, 21 bp, Artificial Sequence
  source: /note="Description of Artificial Sequence: Synthetic oligonucleotide"
caaggacaaccaatcgacaga

SEQ ID NO: 36921 - DNA, 21 bp, Artificial Sequence
  source: /note="Description of Artificial Sequence: Synthetic oligonucleotide"
caaggaagagaatgggtccaa

SEQ ID NO: 36922 - DNA, 21 bp, Artificial Sequence
  source: /note="Description of Artificial Sequence: Synthetic oligonucleotide"
caaggaagaagcctcccagca

SEQ ID NO: 36923 - DNA, 21 bp, Artificial Sequence
  source: /note="Description of Artificial Sequence: Synthetic oligonucleotide"
caaggaagaacaccacaagca

SEQ ID NO: 36924 - DNA, 21 bp, Artificial Sequence
  source: /note="Description of Artificial Sequence: Synthetic oligonucleotide"
caaggaagccacagcagcaca

SEQ ID NO: 36925 - DNA, 21 bp, Artificial Sequence
  source: /note="Description of Artificial Sequence: Synthetic oligonucleotide"
caaggaagcagaacaaaccca

SEQ ID NO: 36926 - DNA, 21 bp, Artificial Sequence
  source: /note="Description of Artificial Sequence: Synthetic oligonucleotide"
caaggaagcacagcagtcaca

SEQ ID NO: 36927 - DNA, 21 bp, Artificial Sequence
  source: /note="Description of Artificial Sequence: Synthetic oligonucleotide"
caaggaagcacatggagccca

SEQ ID NO: 36928 - DNA, 21 bp, Artificial Sequence
  source: /note="Description of Artificial Sequence: Synthetic oligonucleotide"
caaggaacactcaaaaacatc

SEQ ID NO: 36929 - DNA, 21 bp, Artificial Sequence
  source: /note="Description of Artificial Sequence: Synthetic oligonucleotide"
caaggagtcgcaggacacgca

SEQ ID NO: 36930 - DNA, 21 bp, Artificial Sequence
  source: /note="Description of Artificial Sequence: Synthetic oligonucleotide"
caaggagtcctcctcgtcaca

SEQ ID NO: 36931 - DNA, 21 bp, Artificial Sequence
  source: /note="Description of Artificial Sequence: Synthetic oligonucleotide"
caaggagtcagacaagcagtc

SEQ ID NO: 36932 - DNA, 21 bp, Artificial Sequence
  source: /note="Description of Artificial Sequence: Synthetic oligonucleotide"
caaggagtcagaacaacaagc

SEQ ID NO: 36933 - DNA, 21 bp, Artificial Sequence
  source: /note="Description of Artificial Sequence: Synthetic oligonucleotide"
caacacgaaagaatgccaagc

SEQ ID NO: 36934 - DNA, 21 bp, Artificial Sequence
  source: /note="Description of Artificial Sequence: Synthetic oligonucleotide"
caacacttcaaccaagcagaa

SEQ ID NO: 36935 - DNA, 21 bp, Artificial Sequence
  source: /note="Description of Artificial Sequence: Synthetic oligonucleotide"
caacacggagcaccaacatgg

SEQ ID NO: 36936 - DNA, 21 bp, Artificial Sequence
  source: /note="Description of Artificial Sequence: Synthetic oligonucleotide"
caacacctccacacactcaaa

SEQ ID NO: 36937 - DNA, 21 bp, Artificial Sequence
  source: /note="Description of Artificial Sequence: Synthetic oligonucleotide"
caacacctcaacagctacgtc

SEQ ID NO: 36938 - DNA, 21 bp, Artificial Sequence
  source: /note="Description of Artificial Sequence: Synthetic oligonucleotide"
caacacctcccaagaacaaca

SEQ ID NO: 36939 - DNA, 21 bp, Artificial Sequence
  source: /note="Description of Artificial Sequence: Synthetic oligonucleotide"
caacacctcgtccacgacgca

SEQ ID NO: 36940 - DNA, 21 bp, Artificial Sequence
  source: /note="Description of Artificial Sequence: Synthetic oligonucleotide"
caacacagcctcgcagtcaca

SEQ ID NO: 36941 - DNA, 21 bp, Artificial Sequence
  source: /note="Description of Artificial Sequence: Synthetic oligonucleotide"
caacacagcagcctcggaatc

SEQ ID NO: 36942 - DNA, 21 bp, Artificial Sequence
  source: /note="Description of Artificial Sequence: Synthetic oligonucleotide"
caacacagcagcatggcaaga

SEQ ID NO: 36943 - DNA, 21 bp, Artificial Sequence
  source: /note="Description of Artificial Sequence: Synthetic oligonucleotide"
caacacacagcagcagcactc

SEQ ID NO: 36944 - DNA, 21 bp, Artificial Sequence
  source: /note="Description of Artificial Sequence: Synthetic oligonucleotide"
caacacacactcacaatcagc

SEQ ID NO: 36945 - DNA, 21 bp, Artificial Sequence
  source: /note="Description of Artificial Sequence: Synthetic oligonucleotide"
caacacacaagagtcgtcttc

SEQ ID NO: 36946 - DNA, 21 bp, Artificial Sequence
  source: /note="Description of Artificial Sequence: Synthetic oligonucleotide"
caacacacaacaaaacaaagc

SEQ ID NO: 36947 - DNA, 21 bp, Artificial Sequence
  source: /note="Description of Artificial Sequence: Synthetic oligonucleotide"
caacacgtcagcagcacagga

SEQ ID NO: 36948 - DNA, 21 bp, Artificial Sequence
  source: /note="Description of Artificial Sequence: Synthetic oligonucleotide"
caaatcgcaagaagcagcatc

SEQ ID NO: 36949 - DNA, 21 bp, Artificial Sequence
  source: /note="Description of Artificial Sequence: Synthetic oligonucleotide"
caaatcgactacagagcacca

SEQ ID NO: 36950 - DNA, 21 bp, Artificial Sequence
  source: /note="Description of Artificial Sequence: Synthetic oligonucleotide"
caaatcgaaacactcgcacac

SEQ ID NO: 36951 - DNA, 21 bp, Artificial Sequence
  source: /note="Description of Artificial Sequence: Synthetic oligonucleotide"
caaatcttcggaagaacacca

SEQ ID NO: 36952 - DNA, 21 bp, Artificial Sequence
  source: /note="Description of Artificial Sequence: Synthetic oligonucleotide"
caaatcggattcggaacaagc

SEQ ID NO: 36953 - DNA, 21 bp, Artificial Sequence
  source: /note="Description of Artificial Sequence: Synthetic oligonucleotide"
caaatcggaacatacctcgca

SEQ ID NO: 36954 - DNA, 21 bp, Artificial Sequence
  source: /note="Description of Artificial Sequence: Synthetic oligonucleotide"
caaatccacgaaagcggagaa

SEQ ID NO: 36955 - DNA, 21 bp, Artificial Sequence
  source: /note="Description of Artificial Sequence: Synthetic oligonucleotide"
caaatcatggcagacacaaga

SEQ ID NO: 36956 - DNA, 21 bp, Artificial Sequence
  source: /note="Description of Artificial Sequence: Synthetic oligonucleotide"
caaatcaacttcccaatggac

SEQ ID NO: 36957 - DNA, 21 bp, Artificial Sequence
  source: /note="Description of Artificial Sequence: Synthetic oligonucleotide"
caaatcaacagcaacaaaaca

SEQ ID NO: 36958 - DNA, 21 bp, Artificial Sequence
  source: /note="Description of Artificial Sequence: Synthetic oligonucleotide"
caaatcaacagcacaacagga

SEQ ID NO: 36959 - DNA, 21 bp, Artificial Sequence
  source: /note="Description of Artificial Sequence: Synthetic oligonucleotide"
caaatcccaatcatcgaaagc

SEQ ID NO: 36960 - DNA, 21 bp, Artificial Sequence
  source: /note="Description of Artificial Sequence: Synthetic oligonucleotide"
caaatcccaaaagcaccagga

SEQ ID NO: 36961 - DNA, 21 bp, Artificial Sequence
  source: /note="Description of Artificial Sequence: Synthetic oligonucleotide"
caaatcccaaacagcttcagc

SEQ ID NO: 36962 - DNA, 21 bp, Artificial Sequence
  source: /note="Description of Artificial Sequence: Synthetic oligonucleotide"
caaatcccaacaacactcgca

SEQ ID NO: 36963 - DNA, 21 bp, Artificial Sequence
  source: /note="Description of Artificial Sequence: Synthetic oligonucleotide"
caaatcagaaacagcacagaa

SEQ ID NO: 36964 - DNA, 21 bp, Artificial Sequence
  source: /note="Description of Artificial Sequence: Synthetic oligonucleotide"
caaatcagccaaccaaaaatc

SEQ ID NO: 36965 - DNA, 21 bp, Artificial Sequence
  source: /note="Description of Artificial Sequence: Synthetic oligonucleotide"
caaatcagcacactcacattc

SEQ ID NO: 36966 - DNA, 21 bp, Artificial Sequence
  source: /note="Description of Artificial Sequence: Synthetic oligonucleotide"
caaatcgtcccacaaggacca

SEQ ID NO: 36967 - DNA, 21 bp, Artificial Sequence
  source: /note="Description of Artificial Sequence: Synthetic oligonucleotide"
caaatcgtcacaggactcagc

SEQ ID NO: 36968 - DNA, 21 bp, Artificial Sequence
  source: /note="Description of Artificial Sequence: Synthetic oligonucleotide"
caaatctacggaagcgaaagc

SEQ ID NO: 36969 - DNA, 21 bp, Artificial Sequence
  source: /note="Description of Artificial Sequence: Synthetic oligonucleotide"
caaaaagcagcaagcgcagac

SEQ ID NO: 36970 - DNA, 21 bp, Artificial Sequence
  source: /note="Description of Artificial Sequence: Synthetic oligonucleotide"
caaaaagcaatcgacagcctc

SEQ ID NO: 36971 - DNA, 21 bp, Artificial Sequence
  source: /note="Description of Artificial Sequence: Synthetic oligonucleotide"
caaaaagaactcatcgtcgac

SEQ ID NO: 36972 - DNA, 21 bp, Artificial Sequence
  source: /note="Description of Artificial Sequence: Synthetic oligonucleotide"
caaaaagaaccaggaccaagc

SEQ ID NO: 36973 - DNA, 21 bp, Artificial Sequence
  source: /note="Description of Artificial Sequence: Synthetic oligonucleotide"
caaaaattcgcagacaaagga

SEQ ID NO: 36974 - DNA, 21 bp, Artificial Sequence
  source: /note="Description of Artificial Sequence: Synthetic oligonucleotide"
caaaaacacgacatcagaagc

SEQ ID NO: 36975 - DNA, 21 bp, Artificial Sequence
  source: /note="Description of Artificial Sequence: Synthetic oligonucleotide"
caaaaacacaactgcccagtc

SEQ ID NO: 36976 - DNA, 21 bp, Artificial Sequence
  source: /note="Description of Artificial Sequence: Synthetic oligonucleotide"
caaaaaaaagacccaatccca

SEQ ID NO: 36977 - DNA, 21 bp, Artificial Sequence
  source: /note="Description of Artificial Sequence: Synthetic oligonucleotide"
caaaaaatgcaacactacgac

SEQ ID NO: 36978 - DNA, 21 bp, Artificial Sequence
  source: /note="Description of Artificial Sequence: Synthetic oligonucleotide"
caaaaaccagcaacaagagac

SEQ ID NO: 36979 - DNA, 21 bp, Artificial Sequence
  source: /note="Description of Artificial Sequence: Synthetic oligonucleotide"
caaaaaagcaacaacgcactc

SEQ ID NO: 36980 - DNA, 21 bp, Artificial Sequence
  source: /note="Description of Artificial Sequence: Synthetic oligonucleotide"
caaaaagtcatcgcagaagtc

SEQ ID NO: 36981 - DNA, 21 bp, Artificial Sequence
  source: /note="Description of Artificial Sequence: Synthetic oligonucleotide"
caaaaagtcatgcaaccagga

SEQ ID NO: 36982 - DNA, 21 bp, Artificial Sequence
  source: /note="Description of Artificial Sequence: Synthetic oligonucleotide"
caactcgcaaaccacgtcgga

SEQ ID NO: 36983 - DNA, 21 bp, Artificial Sequence
  source: /note="Description of Artificial Sequence: Synthetic oligonucleotide"
caactcgcaccaccaaaaaca

SEQ ID NO: 36984 - DNA, 21 bp, Artificial Sequence
  source: /note="Description of Artificial Sequence: Synthetic oligonucleotide"
caactcgcaagcaacgcattc

SEQ ID NO: 36985 - DNA, 21 bp, Artificial Sequence
  source: /note="Description of Artificial Sequence: Synthetic oligonucleotide"
caactcgcaagcgtcagaatc

SEQ ID NO: 36986 - DNA, 21 bp, Artificial Sequence
  source: /note="Description of Artificial Sequence: Synthetic oligonucleotide"
caactcgacttcgacctcgtc

SEQ ID NO: 36987 - DNA, 21 bp, Artificial Sequence
  source: /note="Description of Artificial Sequence: Synthetic oligonucleotide"
caactcgacagcctcagcgtc

SEQ ID NO: 36988 - DNA, 21 bp, Artificial Sequence
  source: /note="Description of Artificial Sequence: Synthetic oligonucleotide"
caactcggaccaagcgtccca

SEQ ID NO: 36989 - DNA, 21 bp, Artificial Sequence
  source: /note="Description of Artificial Sequence: Synthetic oligonucleotide"
caactcggaagcctcgacgga

SEQ ID NO: 36990 - DNA, 21 bp, Artificial Sequence
  source: /note="Description of Artificial Sequence: Synthetic oligonucleotide"
caactcggagtcagaagccaa

SEQ ID NO: 36991 - DNA, 21 bp, Artificial Sequence
  source: /note="Description of Artificial Sequence: Synthetic oligonucleotide"
caactccactacgcaaacgaa

SEQ ID NO: 36992 - DNA, 21 bp, Artificial Sequence
  source: /note="Description of Artificial Sequence: Synthetic oligonucleotide"
caactcatcaaaacaccagga

SEQ ID NO: 36993 - DNA, 21 bp, Artificial Sequence
  source: /note="Description of Artificial Sequence: Synthetic oligonucleotide"
caactcaaagcagtcgaattc

SEQ ID NO: 36994 - DNA, 21 bp, Artificial Sequence
  source: /note="Description of Artificial Sequence: Synthetic oligonucleotide"
caactcaaaccactctacttc

SEQ ID NO: 36995 - DNA, 21 bp, Artificial Sequence
  source: /note="Description of Artificial Sequence: Synthetic oligonucleotide"
caactcaaaacagaaatgctc

SEQ ID NO: 36996 - DNA, 21 bp, Artificial Sequence
  source: /note="Description of Artificial Sequence: Synthetic oligonucleotide"
caactcaaaacaagcctcagc

SEQ ID NO: 36997 - DNA, 21 bp, Artificial Sequence
  source: /note="Description of Artificial Sequence: Synthetic oligonucleotide"
caactcctcagaacaggagac

SEQ ID NO: 36998 - DNA, 21 bp, Artificial Sequence
  source: /note="Description of Artificial Sequence: Synthetic oligonucleotide"
caactcctcagagtcacagga

SEQ ID NO: 36999 - DNA, 21 bp, Artificial Sequence
  source: /note="Description of Artificial Sequence: Synthetic oligonucleotide"
caactcatgagactcggagtc

SEQ ID NO: 37000 - DNA, 21 bp, Artificial Sequence
  source: /note="Description of Artificial Sequence: Synthetic oligonucleotide"
caactcaacgacctcgcaaga

SEQ ID NO: 37001 - DNA, 21 bp, Artificial Sequence
  source: /note="Description of Artificial Sequence: Synthetic oligonucleotide"
caactcaacagaccaccaagc

SEQ ID NO: 37002 - DNA, 21 bp, Artificial Sequence
  source: /note="Description of Artificial Sequence: Synthetic oligonucleotide"
caactcccagcagacaacgca

SEQ ID NO: 37003 - DNA, 21 bp, Artificial Sequence
  source: /note="Description of Artificial Sequence: Synthetic oligonucleotide"
caactcccacacgacagcgca

SEQ ID NO: 37004 - DNA, 21 bp, Artificial Sequence
  source: /note="Description of Artificial Sequence: Synthetic oligonucleotide"
caactcccacacgtcaaagtc

SEQ ID NO: 37005 - DNA, 21 bp, Artificial Sequence
  source: /note="Description of Artificial Sequence: Synthetic oligonucleotide"
caactcccacacgtcagcatg

SEQ ID NO: 37006 - DNA, 21 bp, Artificial Sequence
  source: /note="Description of Artificial Sequence: Synthetic oligonucleotide"
caactcccactcacaccacac

SEQ ID NO: 37007 - DNA, 21 bp, Artificial Sequence
  source: /note="Description of Artificial Sequence: Synthetic oligonucleotide"
caactcccaagcacaagaagc

SEQ ID NO: 37008 - DNA, 21 bp, Artificial Sequence
  source: /note="Description of Artificial Sequence: Synthetic oligonucleotide"
caactcccaacaaaactcgac

SEQ ID NO: 37009 - DNA, 21 bp, Artificial Sequence
  source: /note="Description of Artificial Sequence: Synthetic oligonucleotide"
caactcccagtcaacagcagc

SEQ ID NO: 37010 - DNA, 21 bp, Artificial Sequence
  source: /note="Description of Artificial Sequence: Synthetic oligonucleotide"
caactccaaatcacaacagga

SEQ ID NO: 37011 - DNA, 21 bp, Artificial Sequence
  source: /note="Description of Artificial Sequence: Synthetic oligonucleotide"
caactccaactcaaaacagca

SEQ ID NO: 37012 - DNA, 21 bp, Artificial Sequence
  source: /note="Description of Artificial Sequence: Synthetic oligonucleotide"
caactccaaacagacaaaaca

SEQ ID NO: 37013 - DNA, 21 bp, Artificial Sequence
  source: /note="Description of Artificial Sequence: Synthetic oligonucleotide"
caactcagaggaagctaccca

SEQ ID NO: 37014 - DNA, 21 bp, Artificial Sequence
  source: /note="Description of Artificial Sequence: Synthetic oligonucleotide"
caactcagacacacagacttc

SEQ ID NO: 37015 - DNA, 21 bp, Artificial Sequence
  source: /note="Description of Artificial Sequence: Synthetic oligonucleotide"
caactcagaccagcaaacagc

SEQ ID NO: 37016 - DNA, 21 bp, Artificial Sequence
  source: /note="Description of Artificial Sequence: Synthetic oligonucleotide"
caactcagaccagaaggactc

SEQ ID NO: 37017 - DNA, 21 bp, Artificial Sequence
  source: /note="Description of Artificial Sequence: Synthetic oligonucleotide"
caactcagcgcaccagcagca

SEQ ID NO: 37018 - DNA, 21 bp, Artificial Sequence
  source: /note="Description of Artificial Sequence: Synthetic oligonucleotide"
caactcagcgcaagcacaaga

SEQ ID NO: 37019 - DNA, 21 bp, Artificial Sequence
  source: /note="Description of Artificial Sequence: Synthetic oligonucleotide"
caactcagcaaagacgtcagc

SEQ ID NO: 37020 - DNA, 21 bp, Artificial Sequence
  source: /note="Description of Artificial Sequence: Synthetic oligonucleotide"
caactcagcctcgaaccattc

SEQ ID NO: 37021 - DNA, 21 bp, Artificial Sequence
  source: /note="Description of Artificial Sequence: Synthetic oligonucleotide"
caactcagcagagaagaacca

SEQ ID NO: 37022 - DNA, 21 bp, Artificial Sequence
  source: /note="Description of Artificial Sequence: Synthetic oligonucleotide"
caactcagcagaccagtccca

SEQ ID NO: 37023 - DNA, 21 bp, Artificial Sequence
  source: /note="Description of Artificial Sequence: Synthetic oligonucleotide"
caactcagcagcgcaccaaca

SEQ ID NO: 37024 - DNA, 21 bp, Artificial Sequence
  source: /note="Description of Artificial Sequence: Synthetic oligonucleotide"
caactcagcacaacacaagga

SEQ ID NO: 37025 - DNA, 21 bp, Artificial Sequence
  source: /note="Description of Artificial Sequence: Synthetic oligonucleotide"
caactcacagcaggagtccca

SEQ ID NO: 37026 - DNA, 21 bp, Artificial Sequence
  source: /note="Description of Artificial Sequence: Synthetic oligonucleotide"
caactcacaccagtccaccac

SEQ ID NO: 37027 - DNA, 21 bp, Artificial Sequence
  source: /note="Description of Artificial Sequence: Synthetic oligonucleotide"
caactcacaagaggaaactac

SEQ ID NO: 37028 - DNA, 21 bp, Artificial Sequence
  source: /note="Description of Artificial Sequence: Synthetic oligonucleotide"
caactcacagtccacacactc

SEQ ID NO: 37029 - DNA, 21 bp, Artificial Sequence
  source: /note="Description of Artificial Sequence: Synthetic oligonucleotide"
caactcgtccaacaacacctc

SEQ ID NO: 37030 - DNA, 21 bp, Artificial Sequence
  source: /note="Description of Artificial Sequence: Synthetic oligonucleotide"
caaatggcagaaacaagcaga

SEQ ID NO: 37031 - DNA, 21 bp, Artificial Sequence
  source: /note="Description of Artificial Sequence: Synthetic oligonucleotide"
caaatggcaagaacaatgagc

SEQ ID NO: 37032 - DNA, 21 bp, Artificial Sequence
  source: /note="Description of Artificial Sequence: Synthetic oligonucleotide"
caaatggcaagcatcccaagc

SEQ ID NO: 37033 - DNA, 21 bp, Artificial Sequence
  source: /note="Description of Artificial Sequence: Synthetic oligonucleotide"
caaatggacgacgcaccaagc

SEQ ID NO: 37034 - DNA, 21 bp, Artificial Sequence
  source: /note="Description of Artificial Sequence: Synthetic oligonucleotide"
caaatggacaacagaaaccca

SEQ ID NO: 37035 - DNA, 21 bp, Artificial Sequence
  source: /note="Description of Artificial Sequence: Synthetic oligonucleotide"
caaatggacagaagcagagtc

SEQ ID NO: 37036 - DNA, 21 bp, Artificial Sequence
  source: /note="Description of Artificial Sequence: Synthetic oligonucleotide"
caaatggaagcagcactctac

SEQ ID NO: 37037 - DNA, 21 bp, Artificial Sequence
  source: /note="Description of Artificial Sequence: Synthetic oligonucleotide"
caaatgcacagcagcctccac

SEQ ID NO: 37038 - DNA, 21 bp, Artificial Sequence
  source: /note="Description of Artificial Sequence: Synthetic oligonucleotide"
caaatgaaaaaccaagcaaca

SEQ ID NO: 37039 - DNA, 21 bp, Artificial Sequence
  source: /note="Description of Artificial Sequence: Synthetic oligonucleotide"
caaatgctcgacaaaaaccac

SEQ ID NO: 37040 - DNA, 21 bp, Artificial Sequence
  source: /note="Description of Artificial Sequence: Synthetic oligonucleotide"
caaatgaacgcactcccaatg

SEQ ID NO: 37041 - DNA, 21 bp, Artificial Sequence
  source: /note="Description of Artificial Sequence: Synthetic oligonucleotide"
caaatgaacatgccaaacgac

SEQ ID NO: 37042 - DNA, 21 bp, Artificial Sequence
  source: /note="Description of Artificial Sequence: Synthetic oligonucleotide"
caaatgccagcaacagcaaaa

SEQ ID NO: 37043 - DNA, 21 bp, Artificial Sequence
  source: /note="Description of Artificial Sequence: Synthetic oligonucleotide"
caaatgccagaaggaacaagc

SEQ ID NO: 37044 - DNA, 21 bp, Artificial Sequence
  source: /note="Description of Artificial Sequence: Synthetic oligonucleotide"
caaatgccaccaaacagcaac

SEQ ID NO: 37045 - DNA, 21 bp, Artificial Sequence
  source: /note="Description of Artificial Sequence: Synthetic oligonucleotide"
caaatgccaagcttcggagaa

SEQ ID NO: 37046 - DNA, 21 bp, Artificial Sequence
  source: /note="Description of Artificial Sequence: Synthetic oligonucleotide"
caaatgccaagcatgagcgga

SEQ ID NO: 37047 - DNA, 21 bp, Artificial Sequence
  source: /note="Description of Artificial Sequence: Synthetic oligonucleotide"
caaatgccaagcagcagaagc

SEQ ID NO: 37048 - DNA, 21 bp, Artificial Sequence
  source: /note="Description of Artificial Sequence: Synthetic oligonucleotide"
caaatgccaacaagaacaaca

SEQ ID NO: 37049 - DNA, 21 bp, Artificial Sequence
  source: /note="Description of Artificial Sequence: Synthetic oligonucleotide"
caaatgcaaagaccactcatc

SEQ ID NO: 37050 - DNA, 21 bp, Artificial Sequence
  source: /note="Description of Artificial Sequence: Synthetic oligonucleotide"
caaatgagcatcgtcgtccca

SEQ ID NO: 37051 - DNA, 21 bp, Artificial Sequence
  source: /note="Description of Artificial Sequence: Synthetic oligonucleotide"
caaatgacaatcctcaaacaa

SEQ ID NO: 37052 - DNA, 21 bp, Artificial Sequence
  source: /note="Description of Artificial Sequence: Synthetic oligonucleotide"
caaaacgaagcactcgtcgga

SEQ ID NO: 37053 - DNA, 21 bp, Artificial Sequence
  source: /note="Description of Artificial Sequence: Synthetic oligonucleotide"
caaaacgaactcttcagagca

SEQ ID NO: 37054 - DNA, 21 bp, Artificial Sequence
  source: /note="Description of Artificial Sequence: Synthetic oligonucleotide"
caaaacggactcccacaaaca

SEQ ID NO: 37055 - DNA, 21 bp, Artificial Sequence
  source: /note="Description of Artificial Sequence: Synthetic oligonucleotide"
caaaaccacccagtcacaaaa

SEQ ID NO: 37056 - DNA, 21 bp, Artificial Sequence
  source: /note="Description of Artificial Sequence: Synthetic oligonucleotide"
caaaacatcctcgcacactgg

SEQ ID NO: 37057 - DNA, 21 bp, Artificial Sequence
  source: /note="Description of Artificial Sequence: Synthetic oligonucleotide"
caaaacaaaagcaacagctac

SEQ ID NO: 37058 - DNA, 21 bp, Artificial Sequence
  source: /note="Description of Artificial Sequence: Synthetic oligonucleotide"
caaaacctcccaagcgcatac

SEQ ID NO: 37059 - DNA, 21 bp, Artificial Sequence
  source: /note="Description of Artificial Sequence: Synthetic oligonucleotide"
caaaacctcacattcggaatg

SEQ ID NO: 37060 - DNA, 21 bp, Artificial Sequence
  source: /note="Description of Artificial Sequence: Synthetic oligonucleotide"
caaaacctcacaggaaaaagc

SEQ ID NO: 37061 - DNA, 21 bp, Artificial Sequence
  source: /note="Description of Artificial Sequence: Synthetic oligonucleotide"
caaaacatggtctgcgtcgca

SEQ ID NO: 37062 - DNA, 21 bp, Artificial Sequence
  source: /note="Description of Artificial Sequence: Synthetic oligonucleotide"
caaaacccaaacatcagcgga

SEQ ID NO: 37063 - DNA, 21 bp, Artificial Sequence
  source: /note="Description of Artificial Sequence: Synthetic oligonucleotide"
caaaacccaccacacatccaa

SEQ ID NO: 37064 - DNA, 21 bp, Artificial Sequence
  source: /note="Description of Artificial Sequence: Synthetic oligonucleotide"
caaaacccaagactcccactc

SEQ ID NO: 37065 - DNA, 21 bp, Artificial Sequence
  source: /note="Description of Artificial Sequence: Synthetic oligonucleotide"
caaaacccaagaacaggacaa

SEQ ID NO: 37066 - DNA, 21 bp, Artificial Sequence
  source: /note="Description of Artificial Sequence: Synthetic oligonucleotide"
caaaacccaacatacaaactc

SEQ ID NO: 37067 - DNA, 21 bp, Artificial Sequence
  source: /note="Description of Artificial Sequence: Synthetic oligonucleotide"
caaaacagaatcgtcgaacca

SEQ ID NO: 37068 - DNA, 21 bp, Artificial Sequence
  source: /note="Description of Artificial Sequence: Synthetic oligonucleotide"
caaaacagcgcaccagcaatc

SEQ ID NO: 37069 - DNA, 21 bp, Artificial Sequence
  source: /note="Description of Artificial Sequence: Synthetic oligonucleotide"
caaaacacaagcagcggactc

SEQ ID NO: 37070 - DNA, 21 bp, Artificial Sequence
  source: /note="Description of Artificial Sequence: Synthetic oligonucleotide"
caaaacgtcatgcacatgagc

SEQ ID NO: 37071 - DNA, 21 bp, Artificial Sequence
  source: /note="Description of Artificial Sequence: Synthetic oligonucleotide"
caaaacgtccaaagataccca

SEQ ID NO: 37072 - DNA, 21 bp, Artificial Sequence
  source: /note="Description of Artificial Sequence: Synthetic oligonucleotide"
caaaacgtcagaagccaaaca

SEQ ID NO: 37073 - DNA, 21 bp, Artificial Sequence
  source: /note="Description of Artificial Sequence: Synthetic oligonucleotide"
caaaactacctcaaaacagaa

SEQ ID NO: 37074 - DNA, 21 bp, Artificial Sequence
  source: /note="Description of Artificial Sequence: Synthetic oligonucleotide"
caaccagcagcaggacacttc

SEQ ID NO: 37075 - DNA, 21 bp, Artificial Sequence
  source: /note="Description of Artificial Sequence: Synthetic oligonucleotide"
caaccagcacactgcagcgac

SEQ ID NO: 37076 - DNA, 21 bp, Artificial Sequence
  source: /note="Description of Artificial Sequence: Synthetic oligonucleotide"
caaccagcaaaaggataccca

SEQ ID NO: 37077 - DNA, 21 bp, Artificial Sequence
  source: /note="Description of Artificial Sequence: Synthetic oligonucleotide"
caaccagcaccaacactcaga

SEQ ID NO: 37078 - DNA, 21 bp, Artificial Sequence
  source: /note="Description of Artificial Sequence: Synthetic oligonucleotide"
caaccagcaacagaagtcctc

SEQ ID NO: 37079 - DNA, 21 bp, Artificial Sequence
  source: /note="Description of Artificial Sequence: Synthetic oligonucleotide"
caaccagcagtcatggaaagc

SEQ ID NO: 37080 - DNA, 21 bp, Artificial Sequence
  source: /note="Description of Artificial Sequence: Synthetic oligonucleotide"
caaccagacccaagcccacca

SEQ ID NO: 37081 - DNA, 21 bp, Artificial Sequence
  source: /note="Description of Artificial Sequence: Synthetic oligonucleotide"
caaccattctacagcgacgaa

SEQ ID NO: 37082 - DNA, 21 bp, Artificial Sequence
  source: /note="Description of Artificial Sequence: Synthetic oligonucleotide"
caaccaggagtcagccacaca

SEQ ID NO: 37083 - DNA, 21 bp, Artificial Sequence
  source: /note="Description of Artificial Sequence: Synthetic oligonucleotide"
caaccacacggagacccaatg

SEQ ID NO: 37084 - DNA, 21 bp, Artificial Sequence
  source: /note="Description of Artificial Sequence: Synthetic oligonucleotide"
caaccaatcgcacacacagac

SEQ ID NO: 37085 - DNA, 21 bp, Artificial Sequence
  source: /note="Description of Artificial Sequence: Synthetic oligonucleotide"
caaccaatccaaacaagagca

SEQ ID NO: 37086 - DNA, 21 bp, Artificial Sequence
  source: /note="Description of Artificial Sequence: Synthetic oligonucleotide"
caaccaatcagcgcaacactc

SEQ ID NO: 37087 - DNA, 21 bp, Artificial Sequence
  source: /note="Description of Artificial Sequence: Synthetic oligonucleotide"
caaccaaaattctgcggagca

SEQ ID NO: 37088 - DNA, 21 bp, Artificial Sequence
  source: /note="Description of Artificial Sequence: Synthetic oligonucleotide"
caaccaaaactcagcgcaagc

SEQ ID NO: 37089 - DNA, 21 bp, Artificial Sequence
  source: /note="Description of Artificial Sequence: Synthetic oligonucleotide"
caaccaaaaagcagcggagtc

SEQ ID NO: 37090 - DNA, 21 bp, Artificial Sequence
  source: /note="Description of Artificial Sequence: Synthetic oligonucleotide"
caaccactcgcaagagcaagc

SEQ ID NO: 37091 - DNA, 21 bp, Artificial Sequence
  source: /note="Description of Artificial Sequence: Synthetic oligonucleotide"
caaccactcgcaagcaaaaca

SEQ ID NO: 37092 - DNA, 21 bp, Artificial Sequence
  source: /note="Description of Artificial Sequence: Synthetic oligonucleotide"
caaccactcctcagcgcaagc

SEQ ID NO: 37093 - DNA, 21 bp, Artificial Sequence
  source: /note="Description of Artificial Sequence: Synthetic oligonucleotide"
caaccactcacaatgagaagc

SEQ ID NO: 37094 - DNA, 21 bp, Artificial Sequence
  source: /note="Description of Artificial Sequence: Synthetic oligonucleotide"
caaccactcacaagcgacaca

SEQ ID NO: 37095 - DNA, 21 bp, Artificial Sequence
  source: /note="Description of Artificial Sequence: Synthetic oligonucleotide"
caaccaatgctcgtcgtcagc

SEQ ID NO: 37096 - DNA, 21 bp, Artificial Sequence
  source: /note="Description of Artificial Sequence: Synthetic oligonucleotide"
caaccaaacccagtcgcacac

SEQ ID NO: 37097 - DNA, 21 bp, Artificial Sequence
  source: /note="Description of Artificial Sequence: Synthetic oligonucleotide"
caaccaaactacccatgcgca

SEQ ID NO: 37098 - DNA, 21 bp, Artificial Sequence
  source: /note="Description of Artificial Sequence: Synthetic oligonucleotide"
caaccaccaggaatgagcagc

SEQ ID NO: 37099 - DNA, 21 bp, Artificial Sequence
  source: /note="Description of Artificial Sequence: Synthetic oligonucleotide"
caaccaccaaacacagaagac

SEQ ID NO: 37100 - DNA, 21 bp, Artificial Sequence
  source: /note="Description of Artificial Sequence: Synthetic oligonucleotide"
caaccaccaagaagccaactc

SEQ ID NO: 37101 - DNA, 21 bp, Artificial Sequence
  source: /note="Description of Artificial Sequence: Synthetic oligonucleotide"
caaccaccaagcccaatcagc

SEQ ID NO: 37102 - DNA, 21 bp, Artificial Sequence
  source: /note="Description of Artificial Sequence: Synthetic oligonucleotide"
caaccaccatacctcagcgga

SEQ ID NO: 37103 - DNA, 21 bp, Artificial Sequence
  source: /note="Description of Artificial Sequence: Synthetic oligonucleotide"
caaccacaaggaagagaacca

SEQ ID NO: 37104 - DNA, 21 bp, Artificial Sequence
  source: /note="Description of Artificial Sequence: Synthetic oligonucleotide"
caaccaagagcagaagtccca

SEQ ID NO: 37105 - DNA, 21 bp, Artificial Sequence
  source: /note="Description of Artificial Sequence: Synthetic oligonucleotide"
caaccaagagacgcaggaagc

SEQ ID NO: 37106 - DNA, 21 bp, Artificial Sequence
  source: /note="Description of Artificial Sequence: Synthetic oligonucleotide"
caaccaagactcctcgacaac

SEQ ID NO: 37107 - DNA, 21 bp, Artificial Sequence
  source: /note="Description of Artificial Sequence: Synthetic oligonucleotide"
caaccaagaacactcagcaca

SEQ ID NO: 37108 - DNA, 21 bp, Artificial Sequence
  source: /note="Description of Artificial Sequence: Synthetic oligonucleotide"
caaccaagcgcagcagcaaga

SEQ ID NO: 37109 - DNA, 21 bp, Artificial Sequence
  source: /note="Description of Artificial Sequence: Synthetic oligonucleotide"
caaccaagccacggaacacca

SEQ ID NO: 37110 - DNA, 21 bp, Artificial Sequence
  source: /note="Description of Artificial Sequence: Synthetic oligonucleotide"
caaccaagcctcgtcacactc

SEQ ID NO: 37111 - DNA, 21 bp, Artificial Sequence
  source: /note="Description of Artificial Sequence: Synthetic oligonucleotide"
caaccaagcatggaaccacaa

SEQ ID NO: 37112 - DNA, 21 bp, Artificial Sequence
  source: /note="Description of Artificial Sequence: Synthetic oligonucleotide"
caaccaagcatgcaaagcgaa

SEQ ID NO: 37113 - DNA, 21 bp, Artificial Sequence
  source: /note="Description of Artificial Sequence: Synthetic oligonucleotide"
caaccaagcaacatgggacac

SEQ ID NO: 37114 - DNA, 21 bp, Artificial Sequence
  source: /note="Description of Artificial Sequence: Synthetic oligonucleotide"
caaccaagcccaggattccac

SEQ ID NO: 37115 - DNA, 21 bp, Artificial Sequence
  source: /note="Description of Artificial Sequence: Synthetic oligonucleotide"
caaccaagcagccacccagtc

SEQ ID NO: 37116 - DNA, 21 bp, Artificial Sequence
  source: /note="Description of Artificial Sequence: Synthetic oligonucleotide"
caaccaacagacacactcagc

SEQ ID NO: 37117 - DNA, 21 bp, Artificial Sequence
  source: /note="Description of Artificial Sequence: Synthetic oligonucleotide"
caaccaacaccaacaccacac

SEQ ID NO: 37118 - DNA, 21 bp, Artificial Sequence
  source: /note="Description of Artificial Sequence: Synthetic oligonucleotide"
caaccagtcaacccaatgcac

SEQ ID NO: 37119 - DNA, 21 bp, Artificial Sequence
  source: /note="Description of Artificial Sequence: Synthetic oligonucleotide"
caaccagtcaacccaagagtc

SEQ ID NO: 37120 - DNA, 21 bp, Artificial Sequence
  source: /note="Description of Artificial Sequence: Synthetic oligonucleotide"
caaccagtcgtcacaccaaaa

SEQ ID NO: 37121 - DNA, 21 bp, Artificial Sequence
  source: /note="Description of Artificial Sequence: Synthetic oligonucleotide"
caaccatacagcagcagcctc

SEQ ID NO: 37122 - DNA, 21 bp, Artificial Sequence
  source: /note="Description of Artificial Sequence: Synthetic oligonucleotide"
caacaagcagacgcaacaatc

SEQ ID NO: 37123 - DNA, 21 bp, Artificial Sequence
  source: /note="Description of Artificial Sequence: Synthetic oligonucleotide"
caacaagcactcagcatggca

SEQ ID NO: 37124 - DNA, 21 bp, Artificial Sequence
  source: /note="Description of Artificial Sequence: Synthetic oligonucleotide"
caacaagcaccatacagacca

SEQ ID NO: 37125 - DNA, 21 bp, Artificial Sequence
  source: /note="Description of Artificial Sequence: Synthetic oligonucleotide"
caacaagaagtcgcaagactc

SEQ ID NO: 37126 - DNA, 21 bp, Artificial Sequence
  source: /note="Description of Artificial Sequence: Synthetic oligonucleotide"
caacaaggaagatgcccagac

SEQ ID NO: 37127 - DNA, 21 bp, Artificial Sequence
  source: /note="Description of Artificial Sequence: Synthetic oligonucleotide"
caacaaatcatcgaaagcctc

SEQ ID NO: 37128 - DNA, 21 bp, Artificial Sequence
  source: /note="Description of Artificial Sequence: Synthetic oligonucleotide"
caacaaaaaatgagctacgac

SEQ ID NO: 37129 - DNA, 21 bp, Artificial Sequence
  source: /note="Description of Artificial Sequence: Synthetic oligonucleotide"
caacaaagactcatgggagaa

SEQ ID NO: 37130 - DNA, 21 bp, Artificial Sequence
  source: /note="Description of Artificial Sequence: Synthetic oligonucleotide"
caacaaagactccaaatgatg

SEQ ID NO: 37131 - DNA, 21 bp, Artificial Sequence
  source: /note="Description of Artificial Sequence: Synthetic oligonucleotide"
caacaaagaagcagcctcctc

SEQ ID NO: 37132 - DNA, 21 bp, Artificial Sequence
  source: /note="Description of Artificial Sequence: Synthetic oligonucleotide"
caacaaagagtcaacccagaa

SEQ ID NO: 37133 - DNA, 21 bp, Artificial Sequence
  source: /note="Description of Artificial Sequence: Synthetic oligonucleotide"
caacaaagcaaccaaacaaaa

SEQ ID NO: 37134 - DNA, 21 bp, Artificial Sequence
  source: /note="Description of Artificial Sequence: Synthetic oligonucleotide"
caacaaacagcaggaagcgac

SEQ ID NO: 37135 - DNA, 21 bp, Artificial Sequence
  source: /note="Description of Artificial Sequence: Synthetic oligonucleotide"
caacaaacaggatacctccca

SEQ ID NO: 37136 - DNA, 21 bp, Artificial Sequence
  source: /note="Description of Artificial Sequence: Synthetic oligonucleotide"
caacaaacacacatgggaagc

SEQ ID NO: 37137 - DNA, 21 bp, Artificial Sequence
  source: /note="Description of Artificial Sequence: Synthetic oligonucleotide"
caacaaacaaaacaactccaa

SEQ ID NO: 37138 - DNA, 21 bp, Artificial Sequence
  source: /note="Description of Artificial Sequence: Synthetic oligonucleotide"
caacaaacaaaaagcacagca

SEQ ID NO: 37139 - DNA, 21 bp, Artificial Sequence
  source: /note="Description of Artificial Sequence: Synthetic oligonucleotide"
caacaaacaaacgacagaaac

SEQ ID NO: 37140 - DNA, 21 bp, Artificial Sequence
  source: /note="Description of Artificial Sequence: Synthetic oligonucleotide"
caacaaacaagaacaagcctc

SEQ ID NO: 37141 - DNA, 21 bp, Artificial Sequence
  source: /note="Description of Artificial Sequence: Synthetic oligonucleotide"
caacaaacaagcgcaagagaa

SEQ ID NO: 37142 - DNA, 21 bp, Artificial Sequence
  source: /note="Description of Artificial Sequence: Synthetic oligonucleotide"
caacaagtcaaaagcggagac

SEQ ID NO: 37143 - DNA, 21 bp, Artificial Sequence
  source: /note="Description of Artificial Sequence: Synthetic oligonucleotide"
caaagagcaccagacggatgg

SEQ ID NO: 37144 - DNA, 21 bp, Artificial Sequence
  source: /note="Description of Artificial Sequence: Synthetic oligonucleotide"
caaagagcaccagaaagcatg

SEQ ID NO: 37145 - DNA, 21 bp, Artificial Sequence
  source: /note="Description of Artificial Sequence: Synthetic oligonucleotide"
caaagagcacaactcaacagc

SEQ ID NO: 37146 - DNA, 21 bp, Artificial Sequence
  source: /note="Description of Artificial Sequence: Synthetic oligonucleotide"
caaagagcagtcgcaccaaca

SEQ ID NO: 37147 - DNA, 21 bp, Artificial Sequence
  source: /note="Description of Artificial Sequence: Synthetic oligonucleotide"
caaagagcagtccaagtctac

SEQ ID NO: 37148 - DNA, 21 bp, Artificial Sequence
  source: /note="Description of Artificial Sequence: Synthetic oligonucleotide"
caaagagacgcaagactcgac

SEQ ID NO: 37149 - DNA, 21 bp, Artificial Sequence
  source: /note="Description of Artificial Sequence: Synthetic oligonucleotide"
caaagaggaaaagaagcacac

SEQ ID NO: 37150 - DNA, 21 bp, Artificial Sequence
  source: /note="Description of Artificial Sequence: Synthetic oligonucleotide"
caaagaggaccaggaaaccaa

SEQ ID NO: 37151 - DNA, 21 bp, Artificial Sequence
  source: /note="Description of Artificial Sequence: Synthetic oligonucleotide"
caaagaggaccaatggaactc

SEQ ID NO: 37152 - DNA, 21 bp, Artificial Sequence
  source: /note="Description of Artificial Sequence: Synthetic oligonucleotide"
caaagaatcggaccagcactc

SEQ ID NO: 37153 - DNA, 21 bp, Artificial Sequence
  source: /note="Description of Artificial Sequence: Synthetic oligonucleotide"
caaagaatcccagtcgacgtc

SEQ ID NO: 37154 - DNA, 21 bp, Artificial Sequence
  source: /note="Description of Artificial Sequence: Synthetic oligonucleotide"
caaagactcgcaagcccaagc

SEQ ID NO: 37155 - DNA, 21 bp, Artificial Sequence
  source: /note="Description of Artificial Sequence: Synthetic oligonucleotide"
caaagactcacagcacaagaa

SEQ ID NO: 37156 - DNA, 21 bp, Artificial Sequence
  source: /note="Description of Artificial Sequence: Synthetic oligonucleotide"
caaagaatggcaaacatgagc

SEQ ID NO: 37157 - DNA, 21 bp, Artificial Sequence
  source: /note="Description of Artificial Sequence: Synthetic oligonucleotide"
caaagaatgacacaagacatg

SEQ ID NO: 37158 - DNA, 21 bp, Artificial Sequence
  source: /note="Description of Artificial Sequence: Synthetic oligonucleotide"
caaagaaacagcaacacattc

SEQ ID NO: 37159 - DNA, 21 bp, Artificial Sequence
  source: /note="Description of Artificial Sequence: Synthetic oligonucleotide"
caaagaccaggactccacatg

SEQ ID NO: 37160 - DNA, 21 bp, Artificial Sequence
  source: /note="Description of Artificial Sequence: Synthetic oligonucleotide"
caaagaccactcggaggactc

SEQ ID NO: 37161 - DNA, 21 bp, Artificial Sequence
  source: /note="Description of Artificial Sequence: Synthetic oligonucleotide"
caaagaccaccaagcgtcgac

SEQ ID NO: 37162 - DNA, 21 bp, Artificial Sequence
  source: /note="Description of Artificial Sequence: Synthetic oligonucleotide"
caaagaccaacagacagaaca

SEQ ID NO: 37163 - DNA, 21 bp, Artificial Sequence
  source: /note="Description of Artificial Sequence: Synthetic oligonucleotide"
caaagacaaccagtcctcgac

SEQ ID NO: 37164 - DNA, 21 bp, Artificial Sequence
  source: /note="Description of Artificial Sequence: Synthetic oligonucleotide"
caaagacaaagagacctccca

SEQ ID NO: 37165 - DNA, 21 bp, Artificial Sequence
  source: /note="Description of Artificial Sequence: Synthetic oligonucleotide"
caaagaagcgcaaacgtcgca

SEQ ID NO: 37166 - DNA, 21 bp, Artificial Sequence
  source: /note="Description of Artificial Sequence: Synthetic oligonucleotide"
caaagaagccacatgaaccca

SEQ ID NO: 37167 - DNA, 21 bp, Artificial Sequence
  source: /note="Description of Artificial Sequence: Synthetic oligonucleotide"
caaagaagcagcggaacacca

SEQ ID NO: 37168 - DNA, 21 bp, Artificial Sequence
  source: /note="Description of Artificial Sequence: Synthetic oligonucleotide"
caaagaagcacaaacctcaac

SEQ ID NO: 37169 - DNA, 21 bp, Artificial Sequence
  source: /note="Description of Artificial Sequence: Synthetic oligonucleotide"
caaagaacagtccaccaagga

SEQ ID NO: 37170 - DNA, 21 bp, Artificial Sequence
  source: /note="Description of Artificial Sequence: Synthetic oligonucleotide"
caaagaacagtcagaggagaa

SEQ ID NO: 37171 - DNA, 21 bp, Artificial Sequence
  source: /note="Description of Artificial Sequence: Synthetic oligonucleotide"
caaagagtcaacagcagcgga

SEQ ID NO: 37172 - DNA, 21 bp, Artificial Sequence
  source: /note="Description of Artificial Sequence: Synthetic oligonucleotide"
caaagcgcagacctcgactac

SEQ ID NO: 37173 - DNA, 21 bp, Artificial Sequence
  source: /note="Description of Artificial Sequence: Synthetic oligonucleotide"
caaagcgcagaagcagaagca

SEQ ID NO: 37174 - DNA, 21 bp, Artificial Sequence
  source: /note="Description of Artificial Sequence: Synthetic oligonucleotide"
caaagcgcacacccagcaaca

SEQ ID NO: 37175 - DNA, 21 bp, Artificial Sequence
  source: /note="Description of Artificial Sequence: Synthetic oligonucleotide"
caaagcgcaccagtcagagtc

SEQ ID NO: 37176 - DNA, 21 bp, Artificial Sequence
  source: /note="Description of Artificial Sequence: Synthetic oligonucleotide"
caaagcgcaagcgcactccaa

SEQ ID NO: 37177 - DNA, 21 bp, Artificial Sequence
  source: /note="Description of Artificial Sequence: Synthetic oligonucleotide"
caaagcgcaagcgtcatgaac

SEQ ID NO: 37178 - DNA, 21 bp, Artificial Sequence
  source: /note="Description of Artificial Sequence: Synthetic oligonucleotide"
caaagcgcagtcctcgaatac

SEQ ID NO: 37179 - DNA, 21 bp, Artificial Sequence
  source: /note="Description of Artificial Sequence: Synthetic oligonucleotide"
caaagcgacgactggccagtc

SEQ ID NO: 37180 - DNA, 21 bp, Artificial Sequence
  source: /note="Description of Artificial Sequence: Synthetic oligonucleotide"
caaagcgacatcagaaaccca

SEQ ID NO: 37181 - DNA, 21 bp, Artificial Sequence
  source: /note="Description of Artificial Sequence: Synthetic oligonucleotide"
caaagcgactgggtcccagtc

SEQ ID NO: 37182 - DNA, 21 bp, Artificial Sequence
  source: /note="Description of Artificial Sequence: Synthetic oligonucleotide"
caaagcgaaaaaggaacatac

SEQ ID NO: 37183 - DNA, 21 bp, Artificial Sequence
  source: /note="Description of Artificial Sequence: Synthetic oligonucleotide"
caaagcgaaatgatggacgca

SEQ ID NO: 37184 - DNA, 21 bp, Artificial Sequence
  source: /note="Description of Artificial Sequence: Synthetic oligonucleotide"
caaagcgaaagagcaacagtc

SEQ ID NO: 37185 - DNA, 21 bp, Artificial Sequence
  source: /note="Description of Artificial Sequence: Synthetic oligonucleotide"
caaagcttccaccacgaaaga

SEQ ID NO: 37186 - DNA, 21 bp, Artificial Sequence
  source: /note="Description of Artificial Sequence: Synthetic oligonucleotide"
caaagcttcccactccaagca

SEQ ID NO: 37187 - DNA, 21 bp, Artificial Sequence
  source: /note="Description of Artificial Sequence: Synthetic oligonucleotide"
caaagcggacaaggaatgtac

SEQ ID NO: 37188 - DNA, 21 bp, Artificial Sequence
  source: /note="Description of Artificial Sequence: Synthetic oligonucleotide"
caaagcggaagatggcactgg

SEQ ID NO: 37189 - DNA, 21 bp, Artificial Sequence
  source: /note="Description of Artificial Sequence: Synthetic oligonucleotide"
caaagcggaagcagcgcaaga

SEQ ID NO: 37190 - DNA, 21 bp, Artificial Sequence
  source: /note="Description of Artificial Sequence: Synthetic oligonucleotide"
caaagccacccattcaacgac

SEQ ID NO: 37191 - DNA, 21 bp, Artificial Sequence
  source: /note="Description of Artificial Sequence: Synthetic oligonucleotide"
caaagccacacacaaggaagc

SEQ ID NO: 37192 - DNA, 21 bp, Artificial Sequence
  source: /note="Description of Artificial Sequence: Synthetic oligonucleotide"
caaagcatcgcagtcacaatc

SEQ ID NO: 37193 - DNA, 21 bp, Artificial Sequence
  source: /note="Description of Artificial Sequence: Synthetic oligonucleotide"
caaagcatcgtcatcgcacac

SEQ ID NO: 37194 - DNA, 21 bp, Artificial Sequence
  source: /note="Description of Artificial Sequence: Synthetic oligonucleotide"
caaagcaaactcgcaagcctc

SEQ ID NO: 37195 - DNA, 21 bp, Artificial Sequence
  source: /note="Description of Artificial Sequence: Synthetic oligonucleotide"
caaagcaaactctacctcgaa

SEQ ID NO: 37196 - DNA, 21 bp, Artificial Sequence
  source: /note="Description of Artificial Sequence: Synthetic oligonucleotide"
caaagcaaaatgccaaactgg

SEQ ID NO: 37197 - DNA, 21 bp, Artificial Sequence
  source: /note="Description of Artificial Sequence: Synthetic oligonucleotide"
caaagcctcaacgacctcaaa

SEQ ID NO: 37198 - DNA, 21 bp, Artificial Sequence
  source: /note="Description of Artificial Sequence: Synthetic oligonucleotide"
caaagcatgagcagcacactc

SEQ ID NO: 37199 - DNA, 21 bp, Artificial Sequence
  source: /note="Description of Artificial Sequence: Synthetic oligonucleotide"
caaagcaaccaagacagacaa

SEQ ID NO: 37200 - DNA, 21 bp, Artificial Sequence
  source: /note="Description of Artificial Sequence: Synthetic oligonucleotide"
caaagcaacagcagcaacaca

SEQ ID NO: 37201 - DNA, 21 bp, Artificial Sequence
  source: /note="Description of Artificial Sequence: Synthetic oligonucleotide"
caaagcccaggacacccaagc

SEQ ID NO: 37202 - DNA, 21 bp, Artificial Sequence
  source: /note="Description of Artificial Sequence: Synthetic oligonucleotide"
caaagcccaaaagaatgctac

SEQ ID NO: 37203 - DNA, 21 bp, Artificial Sequence
  source: /note="Description of Artificial Sequence: Synthetic oligonucleotide"
caaagcccactctacgcaagc

SEQ ID NO: 37204 - DNA, 21 bp, Artificial Sequence
  source: /note="Description of Artificial Sequence: Synthetic oligonucleotide"
caaagcccaaacctcccactc

SEQ ID NO: 37205 - DNA, 21 bp, Artificial Sequence
  source: /note="Description of Artificial Sequence: Synthetic oligonucleotide"
caaagcccaccaagcacagac

SEQ ID NO: 37206 - DNA, 21 bp, Artificial Sequence
  source: /note="Description of Artificial Sequence: Synthetic oligonucleotide"
caaagcccaagaaactacgtc

SEQ ID NO: 37207 - DNA, 21 bp, Artificial Sequence
  source: /note="Description of Artificial Sequence: Synthetic oligonucleotide"
caaagcccaacaaacgacatg

SEQ ID NO: 37208 - DNA, 21 bp, Artificial Sequence
  source: /note="Description of Artificial Sequence: Synthetic oligonucleotide"
caaagccaagcaccacacgga

SEQ ID NO: 37209 - DNA, 21 bp, Artificial Sequence
  source: /note="Description of Artificial Sequence: Synthetic oligonucleotide"
caaagcagagacatcccaaca

SEQ ID NO: 37210 - DNA, 21 bp, Artificial Sequence
  source: /note="Description of Artificial Sequence: Synthetic oligonucleotide"
caaagcagaggagcactccca

SEQ ID NO: 37211 - DNA, 21 bp, Artificial Sequence
  source: /note="Description of Artificial Sequence: Synthetic oligonucleotide"
caaagcagactcggaagcttc

SEQ ID NO: 37212 - DNA, 21 bp, Artificial Sequence
  source: /note="Description of Artificial Sequence: Synthetic oligonucleotide"
caaagcagaacaatgacacca

SEQ ID NO: 37213 - DNA, 21 bp, Artificial Sequence
  source: /note="Description of Artificial Sequence: Synthetic oligonucleotide"
caaagcagaacaccaagccca

SEQ ID NO: 37214 - DNA, 21 bp, Artificial Sequence
  source: /note="Description of Artificial Sequence: Synthetic oligonucleotide"
caaagcagcgcaatcagctac

SEQ ID NO: 37215 - DNA, 21 bp, Artificial Sequence
  source: /note="Description of Artificial Sequence: Synthetic oligonucleotide"
caaagcagcgcaagaggaatg

SEQ ID NO: 37216 - DNA, 21 bp, Artificial Sequence
  source: /note="Description of Artificial Sequence: Synthetic oligonucleotide"
caaagcagcgcaacaagaaac

SEQ ID NO: 37217 - DNA, 21 bp, Artificial Sequence
  source: /note="Description of Artificial Sequence: Synthetic oligonucleotide"
caaagcagcgcagtcctcaca

SEQ ID NO: 37218 - DNA, 21 bp, Artificial Sequence
  source: /note="Description of Artificial Sequence: Synthetic oligonucleotide"
caaagcagcgacacaggagaa

SEQ ID NO: 37219 - DNA, 21 bp, Artificial Sequence
  source: /note="Description of Artificial Sequence: Synthetic oligonucleotide"
caaagcagcggacaaacagtc

SEQ ID NO: 37220 - DNA, 21 bp, Artificial Sequence
  source: /note="Description of Artificial Sequence: Synthetic oligonucleotide"
caaagcagcaaaatcgtctac

SEQ ID NO: 37221 - DNA, 21 bp, Artificial Sequence
  source: /note="Description of Artificial Sequence: Synthetic oligonucleotide"
caaagcagcctcagcctcagc

SEQ ID NO: 37222 - DNA, 21 bp, Artificial Sequence
  source: /note="Description of Artificial Sequence: Synthetic oligonucleotide"
caaagcagcatgccacaaaca

SEQ ID NO: 37223 - DNA, 21 bp, Artificial Sequence
  source: /note="Description of Artificial Sequence: Synthetic oligonucleotide"
caaagcagcaacttccaaagc

SEQ ID NO: 37224 - DNA, 21 bp, Artificial Sequence
  source: /note="Description of Artificial Sequence: Synthetic oligonucleotide"
caaagcagcagagcaatggga

SEQ ID NO: 37225 - DNA, 21 bp, Artificial Sequence
  source: /note="Description of Artificial Sequence: Synthetic oligonucleotide"
caaagcagcagaccaagccca

SEQ ID NO: 37226 - DNA, 21 bp, Artificial Sequence
  source: /note="Description of Artificial Sequence: Synthetic oligonucleotide"
caaagcagcacactccaaagc

SEQ ID NO: 37227 - DNA, 21 bp, Artificial Sequence
  source: /note="Description of Artificial Sequence: Synthetic oligonucleotide"
caaagcacagaccaaaaagac

SEQ ID NO: 37228 - DNA, 21 bp, Artificial Sequence
  source: /note="Description of Artificial Sequence: Synthetic oligonucleotide"
caaagcacaggagcactcaga

SEQ ID NO: 37229 - DNA, 21 bp, Artificial Sequence
  source: /note="Description of Artificial Sequence: Synthetic oligonucleotide"
caaagcacaaacgaaagcagc

SEQ ID NO: 37230 - DNA, 21 bp, Artificial Sequence
  source: /note="Description of Artificial Sequence: Synthetic oligonucleotide"
caaagcacacaactcgaccac

SEQ ID NO: 37231 - DNA, 21 bp, Artificial Sequence
  source: /note="Description of Artificial Sequence: Synthetic oligonucleotide"
caaagcacacaaagcgacaaa

SEQ ID NO: 37232 - DNA, 21 bp, Artificial Sequence
  source: /note="Description of Artificial Sequence: Synthetic oligonucleotide"
caaagcacaacaagacaccca

SEQ ID NO: 37233 - DNA, 21 bp, Artificial Sequence
  source: /note="Description of Artificial Sequence: Synthetic oligonucleotide"
caaagcacagtcacagtcaga

SEQ ID NO: 37234 - DNA, 21 bp, Artificial Sequence
  source: /note="Description of Artificial Sequence: Synthetic oligonucleotide"
caaagcgtccacagcccactc

SEQ ID NO: 37235 - DNA, 21 bp, Artificial Sequence
  source: /note="Description of Artificial Sequence: Synthetic oligonucleotide"
caaagcgtcaaatacgacaga

SEQ ID NO: 37236 - DNA, 21 bp, Artificial Sequence
  source: /note="Description of Artificial Sequence: Synthetic oligonucleotide"
caaagcgtcatgacagcacca

SEQ ID NO: 37237 - DNA, 21 bp, Artificial Sequence
  source: /note="Description of Artificial Sequence: Synthetic oligonucleotide"
caaagcgtcaacgcagaactc

SEQ ID NO: 37238 - DNA, 21 bp, Artificial Sequence
  source: /note="Description of Artificial Sequence: Synthetic oligonucleotide"
caaagcgtcccactcgcaagc

SEQ ID NO: 37239 - DNA, 21 bp, Artificial Sequence
  source: /note="Description of Artificial Sequence: Synthetic oligonucleotide"
caaagctacgaagcaagagga

SEQ ID NO: 37240 - DNA, 21 bp, Artificial Sequence
  source: /note="Description of Artificial Sequence: Synthetic oligonucleotide"
caaagctacaacggactcgga

SEQ ID NO: 37241 - DNA, 21 bp, Artificial Sequence
  source: /note="Description of Artificial Sequence: Synthetic oligonucleotide"
caaacagcaggaagactcgca

SEQ ID NO: 37242 - DNA, 21 bp, Artificial Sequence
  source: /note="Description of Artificial Sequence: Synthetic oligonucleotide"
caaacagcaaacaaaccagtc

SEQ ID NO: 37243 - DNA, 21 bp, Artificial Sequence
  source: /note="Description of Artificial Sequence: Synthetic oligonucleotide"
caaacagacggagcaaaagac

SEQ ID NO: 37244 - DNA, 21 bp, Artificial Sequence
  source: /note="Description of Artificial Sequence: Synthetic oligonucleotide"
caaacagacagagcatacgtc

SEQ ID NO: 37245 - DNA, 21 bp, Artificial Sequence
  source: /note="Description of Artificial Sequence: Synthetic oligonucleotide"
caaacagacgtcgacgacatg

SEQ ID NO: 37246 - DNA, 21 bp, Artificial Sequence
  source: /note="Description of Artificial Sequence: Synthetic oligonucleotide"
caaacattcggaggaccagga

SEQ ID NO: 37247 - DNA, 21 bp, Artificial Sequence
  source: /note="Description of Artificial Sequence: Synthetic oligonucleotide"
caaacaggaggaagaagccca

SEQ ID NO: 37248 - DNA, 21 bp, Artificial Sequence
  source: /note="Description of Artificial Sequence: Synthetic oligonucleotide"
caaacaggactcaaccaagac

SEQ ID NO: 37249 - DNA, 21 bp, Artificial Sequence
  source: /note="Description of Artificial Sequence: Synthetic oligonucleotide"
caaacaggaccaacaagagac

SEQ ID NO: 37250 - DNA, 21 bp, Artificial Sequence
  source: /note="Description of Artificial Sequence: Synthetic oligonucleotide"
caaacaggaagagaaccaatg

SEQ ID NO: 37251 - DNA, 21 bp, Artificial Sequence
  source: /note="Description of Artificial Sequence: Synthetic oligonucleotide"
caaacaggaagcagctacagc

SEQ ID NO: 37252 - DNA, 21 bp, Artificial Sequence
  source: /note="Description of Artificial Sequence: Synthetic oligonucleotide"
caaacaatcagaacagaagac

SEQ ID NO: 37253 - DNA, 21 bp, Artificial Sequence
  source: /note="Description of Artificial Sequence: Synthetic oligonucleotide"
caaacaatcagcaaagaccca

SEQ ID NO: 37254 - DNA, 21 bp, Artificial Sequence
  source: /note="Description of Artificial Sequence: Synthetic oligonucleotide"
caaacaaaacacggagaaagc

SEQ ID NO: 37255 - DNA, 21 bp, Artificial Sequence
  source: /note="Description of Artificial Sequence: Synthetic oligonucleotide"
caaacaaaaaacacacaccca

SEQ ID NO: 37256 - DNA, 21 bp, Artificial Sequence
  source: /note="Description of Artificial Sequence: Synthetic oligonucleotide"
caaacaaaaagcctcatccca

SEQ ID NO: 37257 - DNA, 21 bp, Artificial Sequence
  source: /note="Description of Artificial Sequence: Synthetic oligonucleotide"
caaacactccaacacgcaaca

SEQ ID NO: 37258 - DNA, 21 bp, Artificial Sequence
  source: /note="Description of Artificial Sequence: Synthetic oligonucleotide"
caaacactcagcggaatgaga

SEQ ID NO: 37259 - DNA, 21 bp, Artificial Sequence
  source: /note="Description of Artificial Sequence: Synthetic oligonucleotide"
caaacaatgatgccagtccca

SEQ ID NO: 37260 - DNA, 21 bp, Artificial Sequence
  source: /note="Description of Artificial Sequence: Synthetic oligonucleotide"
caaacaatgagaagcgcagga

SEQ ID NO: 37261 - DNA, 21 bp, Artificial Sequence
  source: /note="Description of Artificial Sequence: Synthetic oligonucleotide"
caaacaaacatgcaaagccca

SEQ ID NO: 37262 - DNA, 21 bp, Artificial Sequence
  source: /note="Description of Artificial Sequence: Synthetic oligonucleotide"
caaacaaacccaaacatggtc

SEQ ID NO: 37263 - DNA, 21 bp, Artificial Sequence
  source: /note="Description of Artificial Sequence: Synthetic oligonucleotide"
caaacaaacacagcaacaaaa

SEQ ID NO: 37264 - DNA, 21 bp, Artificial Sequence
  source: /note="Description of Artificial Sequence: Synthetic oligonucleotide"
caaacaccaccaagcgcagca

SEQ ID NO: 37265 - DNA, 21 bp, Artificial Sequence
  source: /note="Description of Artificial Sequence: Synthetic oligonucleotide"
caaacaccaccaacaaacaga

SEQ ID NO: 37266 - DNA, 21 bp, Artificial Sequence
  source: /note="Description of Artificial Sequence: Synthetic oligonucleotide"
caaacaccaagagtcatccaa

SEQ ID NO: 37267 - DNA, 21 bp, Artificial Sequence
  source: /note="Description of Artificial Sequence: Synthetic oligonucleotide"
caaacaccaagcatgacaaga

SEQ ID NO: 37268 - DNA, 21 bp, Artificial Sequence
  source: /note="Description of Artificial Sequence: Synthetic oligonucleotide"
caaacaccaagctacctcgga

SEQ ID NO: 37269 - DNA, 21 bp, Artificial Sequence
  source: /note="Description of Artificial Sequence: Synthetic oligonucleotide"
caaacacaaatcagagtcgga

SEQ ID NO: 37270 - DNA, 21 bp, Artificial Sequence
  source: /note="Description of Artificial Sequence: Synthetic oligonucleotide"
caaacacaaccacaaagcagc

SEQ ID NO: 37271 - DNA, 21 bp, Artificial Sequence
  source: /note="Description of Artificial Sequence: Synthetic oligonucleotide"
caaacacaaagcctctaccca

SEQ ID NO: 37272 - DNA, 21 bp, Artificial Sequence
  source: /note="Description of Artificial Sequence: Synthetic oligonucleotide"
caaacacaaagcccagtccca

SEQ ID NO: 37273 - DNA, 21 bp, Artificial Sequence
  source: /note="Description of Artificial Sequence: Synthetic oligonucleotide"
caaacacaagtcagctacgga

SEQ ID NO: 37274 - DNA, 21 bp, Artificial Sequence
  source: /note="Description of Artificial Sequence: Synthetic oligonucleotide"
caaacaagacacgacctcctc

SEQ ID NO: 37275 - DNA, 21 bp, Artificial Sequence
  source: /note="Description of Artificial Sequence: Synthetic oligonucleotide"
caaacaagactcgcacaacac

SEQ ID NO: 37276 - DNA, 21 bp, Artificial Sequence
  source: /note="Description of Artificial Sequence: Synthetic oligonucleotide"
caaacaagactcccagcaagc

SEQ ID NO: 37277 - DNA, 21 bp, Artificial Sequence
  source: /note="Description of Artificial Sequence: Synthetic oligonucleotide"
caaacaagcgcagcaagagtc

SEQ ID NO: 37278 - DNA, 21 bp, Artificial Sequence
  source: /note="Description of Artificial Sequence: Synthetic oligonucleotide"
caaacaagcccaggagtcatg

SEQ ID NO: 37279 - DNA, 21 bp, Artificial Sequence
  source: /note="Description of Artificial Sequence: Synthetic oligonucleotide"
caaacaagcacagacaacgca

SEQ ID NO: 37280 - DNA, 21 bp, Artificial Sequence
  source: /note="Description of Artificial Sequence: Synthetic oligonucleotide"
caaacaagcgtccacctcaaa

SEQ ID NO: 37281 - DNA, 21 bp, Artificial Sequence
  source: /note="Description of Artificial Sequence: Synthetic oligonucleotide"
caaacaacagcaagagcacaa

SEQ ID NO: 37282 - DNA, 21 bp, Artificial Sequence
  source: /note="Description of Artificial Sequence: Synthetic oligonucleotide"
caaacagtccacgcattcgga

SEQ ID NO: 37283 - DNA, 21 bp, Artificial Sequence
  source: /note="Description of Artificial Sequence: Synthetic oligonucleotide"
caaacagtcagactcacaagc

SEQ ID NO: 37284 - DNA, 21 bp, Artificial Sequence
  source: /note="Description of Artificial Sequence: Synthetic oligonucleotide"
caaacagtcagcgcactcgga

SEQ ID NO: 37285 - DNA, 21 bp, Artificial Sequence
  source: /note="Description of Artificial Sequence: Synthetic oligonucleotide"
caaacatacgacccagcaagc

SEQ ID NO: 37286 - DNA, 21 bp, Artificial Sequence
  source: /note="Description of Artificial Sequence: Synthetic oligonucleotide"
caaacataccacacactcgaa

SEQ ID NO: 37287 - DNA, 21 bp, Artificial Sequence
  source: /note="Description of Artificial Sequence: Synthetic oligonucleotide"
caaacatacccaacaatggaa

SEQ ID NO: 37288 - DNA, 21 bp, Artificial Sequence
  source: /note="Description of Artificial Sequence: Synthetic oligonucleotide"
caagtcgcaggaatgaaattc

SEQ ID NO: 37289 - DNA, 21 bp, Artificial Sequence
  source: /note="Description of Artificial Sequence: Synthetic oligonucleotide"
caagtcgcaagcccatacaga

SEQ ID NO: 37290 - DNA, 21 bp, Artificial Sequence
  source: /note="Description of Artificial Sequence: Synthetic oligonucleotide"
caagtcgacagaagcccacac

SEQ ID NO: 37291 - DNA, 21 bp, Artificial Sequence
  source: /note="Description of Artificial Sequence: Synthetic oligonucleotide"
caagtcgaacacggacaaaca

SEQ ID NO: 37292 - DNA, 21 bp, Artificial Sequence
  source: /note="Description of Artificial Sequence: Synthetic oligonucleotide"
caagtcgaaagagaagcatgg

SEQ ID NO: 37293 - DNA, 21 bp, Artificial Sequence
  source: /note="Description of Artificial Sequence: Synthetic oligonucleotide"
caagtcggaggaagagcattc

SEQ ID NO: 37294 - DNA, 21 bp, Artificial Sequence
  source: /note="Description of Artificial Sequence: Synthetic oligonucleotide"
caagtcggaaaagtcacactc

SEQ ID NO: 37295 - DNA, 21 bp, Artificial Sequence
  source: /note="Description of Artificial Sequence: Synthetic oligonucleotide"
caagtcggagtcaaaaacgga

SEQ ID NO: 37296 - DNA, 21 bp, Artificial Sequence
  source: /note="Description of Artificial Sequence: Synthetic oligonucleotide"
caagtcctcaacggaagagaa

SEQ ID NO: 37297 - DNA, 21 bp, Artificial Sequence
  source: /note="Description of Artificial Sequence: Synthetic oligonucleotide"
caagtcatgccaaacgtcagc

SEQ ID NO: 37298 - DNA, 21 bp, Artificial Sequence
  source: /note="Description of Artificial Sequence: Synthetic oligonucleotide"
caagtcccattcccagcagac

SEQ ID NO: 37299 - DNA, 21 bp, Artificial Sequence
  source: /note="Description of Artificial Sequence: Synthetic oligonucleotide"
caagtcccactcagcctcgaa

SEQ ID NO: 37300 - DNA, 21 bp, Artificial Sequence
  source: /note="Description of Artificial Sequence: Synthetic oligonucleotide"
caagtcccatacgcaccagca

SEQ ID NO: 37301 - DNA, 21 bp, Artificial Sequence
  source: /note="Description of Artificial Sequence: Synthetic oligonucleotide"
caagtccaaccagtccacatc

SEQ ID NO: 37302 - DNA, 21 bp, Artificial Sequence
  source: /note="Description of Artificial Sequence: Synthetic oligonucleotide"
caagtcagagcagcagtcaca

SEQ ID NO: 37303 - DNA, 21 bp, Artificial Sequence
  source: /note="Description of Artificial Sequence: Synthetic oligonucleotide"
caagtcagagacagctacagc

SEQ ID NO: 37304 - DNA, 21 bp, Artificial Sequence
  source: /note="Description of Artificial Sequence: Synthetic oligonucleotide"
caagtcagagaaccagcaatc

SEQ ID NO: 37305 - DNA, 21 bp, Artificial Sequence
  source: /note="Description of Artificial Sequence: Synthetic oligonucleotide"
caagtcagagaaagcagcagc

SEQ ID NO: 37306 - DNA, 21 bp, Artificial Sequence
  source: /note="Description of Artificial Sequence: Synthetic oligonucleotide"
caagtcagactcgaaccaagc

SEQ ID NO: 37307 - DNA, 21 bp, Artificial Sequence
  source: /note="Description of Artificial Sequence: Synthetic oligonucleotide"
caagtcagaccaggactcctc

SEQ ID NO: 37308 - DNA, 21 bp, Artificial Sequence
  source: /note="Description of Artificial Sequence: Synthetic oligonucleotide"
caagtcagccacagagacagc

SEQ ID NO: 37309 - DNA, 21 bp, Artificial Sequence
  source: /note="Description of Artificial Sequence: Synthetic oligonucleotide"
caagtcagcctcggaagcgtc

SEQ ID NO: 37310 - DNA, 21 bp, Artificial Sequence
  source: /note="Description of Artificial Sequence: Synthetic oligonucleotide"
caagtcagcccaagcctcaac

SEQ ID NO: 37311 - DNA, 21 bp, Artificial Sequence
  source: /note="Description of Artificial Sequence: Synthetic oligonucleotide"
caagtcagcagcccagtccca

SEQ ID NO: 37312 - DNA, 21 bp, Artificial Sequence
  source: /note="Description of Artificial Sequence: Synthetic oligonucleotide"
caagtcacaaaaagccacaca

SEQ ID NO: 37313 - DNA, 21 bp, Artificial Sequence
  source: /note="Description of Artificial Sequence: Synthetic oligonucleotide"
caagtcgtcgcaagcctcgga

SEQ ID NO: 37314 - DNA, 21 bp, Artificial Sequence
  source: /note="Description of Artificial Sequence: Synthetic oligonucleotide"
caagtcgtcccacaccaagaa

SEQ ID NO: 37315 - DNA, 21 bp, Artificial Sequence
  source: /note="Description of Artificial Sequence: Synthetic oligonucleotide"
caagtcgtcagaagcagcagc

SEQ ID NO: 37316 - DNA, 21 bp, Artificial Sequence
  source: /note="Description of Artificial Sequence: Synthetic oligonucleotide"
caagtctacacaaaccaatac

SEQ ID NO: 37317 - DNA, 21 bp, Artificial Sequence
  source: /note="Description of Artificial Sequence: Synthetic oligonucleotide"
caatgggcaaacacaggagaa

SEQ ID NO: 37318 - DNA, 21 bp, Artificial Sequence
  source: /note="Description of Artificial Sequence: Synthetic oligonucleotide"
caatgggaagaccacagcaca

SEQ ID NO: 37319 - DNA, 21 bp, Artificial Sequence
  source: /note="Description of Artificial Sequence: Synthetic oligonucleotide"
caatacggagacggaccaaaa

SEQ ID NO: 37320 - DNA, 21 bp, Artificial Sequence
  source: /note="Description of Artificial Sequence: Synthetic oligonucleotide"
caatacggacaacaacacagc

SEQ ID NO: 37321 - DNA, 21 bp, Artificial Sequence
  source: /note="Description of Artificial Sequence: Synthetic oligonucleotide"
caatacggaagcgtccacgga

SEQ ID NO: 37322 - DNA, 21 bp, Artificial Sequence
  source: /note="Description of Artificial Sequence: Synthetic oligonucleotide"
caataccacgcaagcggaaaa

SEQ ID NO: 37323 - DNA, 21 bp, Artificial Sequence
  source: /note="Description of Artificial Sequence: Synthetic oligonucleotide"
caatacaaaagagcagaactc

SEQ ID NO: 37324 - DNA, 21 bp, Artificial Sequence
  source: /note="Description of Artificial Sequence: Synthetic oligonucleotide"
caatacaaaacagacatgaca

SEQ ID NO: 37325 - DNA, 21 bp, Artificial Sequence
  source: /note="Description of Artificial Sequence: Synthetic oligonucleotide"
caatacaaaacaggagcacaa

SEQ ID NO: 37326 - DNA, 21 bp, Artificial Sequence
  source: /note="Description of Artificial Sequence: Synthetic oligonucleotide"
caatacctcgcaacacacgga

SEQ ID NO: 37327 - DNA, 21 bp, Artificial Sequence
  source: /note="Description of Artificial Sequence: Synthetic oligonucleotide"
caatacccaaacagcgacaca

SEQ ID NO: 37328 - DNA, 21 bp, Artificial Sequence
  source: /note="Description of Artificial Sequence: Synthetic oligonucleotide"
caatacccagtcagcccaagc

SEQ ID NO: 37329 - DNA, 21 bp, Artificial Sequence
  source: /note="Description of Artificial Sequence: Synthetic oligonucleotide"
caatacacagcaagcaacagc

SEQ ID NO: 37330 - DNA, 21 bp, Artificial Sequence
  source: /note="Description of Artificial Sequence: Synthetic oligonucleotide"
caatacacaggaacacaaaaa

SEQ ID NO: 37331 - DNA, 21 bp, Artificial Sequence
  source: /note="Description of Artificial Sequence: Synthetic oligonucleotide"
caatacacagtcctcacagaa

SEQ ID NO: 37332 - DNA, 21 bp, Artificial Sequence
  source: /note="Description of Artificial Sequence: Synthetic oligonucleotide"
caatacgtcggaatcggaaca

SEQ ID NO: 37333 - DNA, 21 bp, Artificial Sequence
  source: /note="Description of Artificial Sequence: Synthetic oligonucleotide"
agagcagcagcatacggagca

SEQ ID NO: 37334 - DNA, 21 bp, Artificial Sequence
  source: /note="Description of Artificial Sequence: Synthetic oligonucleotide"
agagcagcaatgatgaaccca

SEQ ID NO: 37335 - DNA, 21 bp, Artificial Sequence
  source: /note="Description of Artificial Sequence: Synthetic oligonucleotide"
agagcagcaatggtcgcagtc

SEQ ID NO: 37336 - DNA, 21 bp, Artificial Sequence
  source: /note="Description of Artificial Sequence: Synthetic oligonucleotide"
agagcagcaaacgacttccca

SEQ ID NO: 37337 - DNA, 21 bp, Artificial Sequence
  source: /note="Description of Artificial Sequence: Synthetic oligonucleotide"
agagcagcaccaacaagcagc

SEQ ID NO: 37338 - DNA, 21 bp, Artificial Sequence
  source: /note="Description of Artificial Sequence: Synthetic oligonucleotide"
agagcagcaacagtcccaaac

SEQ ID NO: 37339 - DNA, 21 bp, Artificial Sequence
  source: /note="Description of Artificial Sequence: Synthetic oligonucleotide"
agagcagacaaaggaccaagc

SEQ ID NO: 37340 - DNA, 21 bp, Artificial Sequence
  source: /note="Description of Artificial Sequence: Synthetic oligonucleotide"
agagcagacccaagaccagga

SEQ ID NO: 37341 - DNA, 21 bp, Artificial Sequence
  source: /note="Description of Artificial Sequence: Synthetic oligonucleotide"
agagcagacagagcaacatac

SEQ ID NO: 37342 - DNA, 21 bp, Artificial Sequence
  source: /note="Description of Artificial Sequence: Synthetic oligonucleotide"
agagcagacgtcccaccagtc

SEQ ID NO: 37343 - DNA, 21 bp, Artificial Sequence
  source: /note="Description of Artificial Sequence: Synthetic oligonucleotide"
agagcagactaccaccacaac

SEQ ID NO: 37344 - DNA, 21 bp, Artificial Sequence
  source: /note="Description of Artificial Sequence: Synthetic oligonucleotide"
agagcagaagcagtctgggac

SEQ ID NO: 37345 - DNA, 21 bp, Artificial Sequence
  source: /note="Description of Artificial Sequence: Synthetic oligonucleotide"
agagcagaaaacatcagcaga

SEQ ID NO: 37346 - DNA, 21 bp, Artificial Sequence
  source: /note="Description of Artificial Sequence: Synthetic oligonucleotide"
agagcagaaagcctcctcgga

SEQ ID NO: 37347 - DNA, 21 bp, Artificial Sequence
  source: /note="Description of Artificial Sequence: Synthetic oligonucleotide"
agagcagaagtcctctacaca

SEQ ID NO: 37348 - DNA, 21 bp, Artificial Sequence
  source: /note="Description of Artificial Sequence: Synthetic oligonucleotide"
agagcagaataccaaagccca

SEQ ID NO: 37349 - DNA, 21 bp, Artificial Sequence
  source: /note="Description of Artificial Sequence: Synthetic oligonucleotide"
agagcattcggacaaagccca

SEQ ID NO: 37350 - DNA, 21 bp, Artificial Sequence
  source: /note="Description of Artificial Sequence: Synthetic oligonucleotide"
agagcattcccaaacgacagc

SEQ ID NO: 37351 - DNA, 21 bp, Artificial Sequence
  source: /note="Description of Artificial Sequence: Synthetic oligonucleotide"
agagcattcagccaagcagaa

SEQ ID NO: 37352 - DNA, 21 bp, Artificial Sequence
  source: /note="Description of Artificial Sequence: Synthetic oligonucleotide"
agagcaggactcagcccaaac

SEQ ID NO: 37353 - DNA, 21 bp, Artificial Sequence
  source: /note="Description of Artificial Sequence: Synthetic oligonucleotide"
agagcaggaccagtcagcaca

SEQ ID NO: 37354 - DNA, 21 bp, Artificial Sequence
  source: /note="Description of Artificial Sequence: Synthetic oligonucleotide"
agagcaggaagctacgaaagc

SEQ ID NO: 37355 - DNA, 21 bp, Artificial Sequence
  source: /note="Description of Artificial Sequence: Synthetic oligonucleotide"
agagcaggagtccaatgcatc

SEQ ID NO: 37356 - DNA, 21 bp, Artificial Sequence
  source: /note="Description of Artificial Sequence: Synthetic oligonucleotide"
agagcacacggaagcggagca

SEQ ID NO: 37357 - DNA, 21 bp, Artificial Sequence
  source: /note="Description of Artificial Sequence: Synthetic oligonucleotide"
agagcaatcgcacaagcagtc

SEQ ID NO: 37358 - DNA, 21 bp, Artificial Sequence
  source: /note="Description of Artificial Sequence: Synthetic oligonucleotide"
agagcaatcgacctcccaaaa

SEQ ID NO: 37359 - DNA, 21 bp, Artificial Sequence
  source: /note="Description of Artificial Sequence: Synthetic oligonucleotide"
agagcaatcgacagcgtccca

SEQ ID NO: 37360 - DNA, 21 bp, Artificial Sequence
  source: /note="Description of Artificial Sequence: Synthetic oligonucleotide"
agagcaatcaaaagcgaccca

SEQ ID NO: 37361 - DNA, 21 bp, Artificial Sequence
  source: /note="Description of Artificial Sequence: Synthetic oligonucleotide"
agagcaatcccaacaccagga

SEQ ID NO: 37362 - DNA, 21 bp, Artificial Sequence
  source: /note="Description of Artificial Sequence: Synthetic oligonucleotide"
agagcactcgacgtcaacgca

SEQ ID NO: 37363 - DNA, 21 bp, Artificial Sequence
  source: /note="Description of Artificial Sequence: Synthetic oligonucleotide"
agagcactcctcaacctccaa

SEQ ID NO: 37364 - DNA, 21 bp, Artificial Sequence
  source: /note="Description of Artificial Sequence: Synthetic oligonucleotide"
agagcactccaaacaacaagc

SEQ ID NO: 37365 - DNA, 21 bp, Artificial Sequence
  source: /note="Description of Artificial Sequence: Synthetic oligonucleotide"
agagcactcagcgcaaacgtc

SEQ ID NO: 37366 - DNA, 21 bp, Artificial Sequence
  source: /note="Description of Artificial Sequence: Synthetic oligonucleotide"
agagcactcagcagcctccca

SEQ ID NO: 37367 - DNA, 21 bp, Artificial Sequence
  source: /note="Description of Artificial Sequence: Synthetic oligonucleotide"
agagcactcacagacctcgtc

SEQ ID NO: 37368 - DNA, 21 bp, Artificial Sequence
  source: /note="Description of Artificial Sequence: Synthetic oligonucleotide"
agagcaatgggaaacgtcctc

SEQ ID NO: 37369 - DNA, 21 bp, Artificial Sequence
  source: /note="Description of Artificial Sequence: Synthetic oligonucleotide"
agagcaatgctcgacagagca

SEQ ID NO: 37370 - DNA, 21 bp, Artificial Sequence
  source: /note="Description of Artificial Sequence: Synthetic oligonucleotide"
agagcaatgccaggagaagtc

SEQ ID NO: 37371 - DNA, 21 bp, Artificial Sequence
  source: /note="Description of Artificial Sequence: Synthetic oligonucleotide"
agagcaatgccaccaagcagc

SEQ ID NO: 37372 - DNA, 21 bp, Artificial Sequence
  source: /note="Description of Artificial Sequence: Synthetic oligonucleotide"
agagcaaacgacccaccacca

SEQ ID NO: 37373 - DNA, 21 bp, Artificial Sequence
  source: /note="Description of Artificial Sequence: Synthetic oligonucleotide"
agagcaaacctcaacatccca

SEQ ID NO: 37374 - DNA, 21 bp, Artificial Sequence
  source: /note="Description of Artificial Sequence: Synthetic oligonucleotide"
agagcaccagaaacagaactc

SEQ ID NO: 37375 - DNA, 21 bp, Artificial Sequence
  source: /note="Description of Artificial Sequence: Synthetic oligonucleotide"
agagcaccaccaagcccaaaa

SEQ ID NO: 37376 - DNA, 21 bp, Artificial Sequence
  source: /note="Description of Artificial Sequence: Synthetic oligonucleotide"
agagcaccacaaggaagcaca

SEQ ID NO: 37377 - DNA, 21 bp, Artificial Sequence
  source: /note="Description of Artificial Sequence: Synthetic oligonucleotide"
agagcaccacaaggatacgga

SEQ ID NO: 37378 - DNA, 21 bp, Artificial Sequence
  source: /note="Description of Artificial Sequence: Synthetic oligonucleotide"
agagcaccaagaccaatcgaa

SEQ ID NO: 37379 - DNA, 21 bp, Artificial Sequence
  source: /note="Description of Artificial Sequence: Synthetic oligonucleotide"
agagcaccagtcagcccaatg

SEQ ID NO: 37380 - DNA, 21 bp, Artificial Sequence
  source: /note="Description of Artificial Sequence: Synthetic oligonucleotide"
agagcacaaccaagcctccac

SEQ ID NO: 37381 - DNA, 21 bp, Artificial Sequence
  source: /note="Description of Artificial Sequence: Synthetic oligonucleotide"
agagcacaaagcccactcagc

SEQ ID NO: 37382 - DNA, 21 bp, Artificial Sequence
  source: /note="Description of Artificial Sequence: Synthetic oligonucleotide"
agagcacaaacaacactcagc

SEQ ID NO: 37383 - DNA, 21 bp, Artificial Sequence
  source: /note="Description of Artificial Sequence: Synthetic oligonucleotide"
agagcacaatacagccaagac

SEQ ID NO: 37384 - DNA, 21 bp, Artificial Sequence
  source: /note="Description of Artificial Sequence: Synthetic oligonucleotide"
agagcacaatacacaggaaac

SEQ ID NO: 37385 - DNA, 21 bp, Artificial Sequence
  source: /note="Description of Artificial Sequence: Synthetic oligonucleotide"
agagcaagcttcccaccagac

SEQ ID NO: 37386 - DNA, 21 bp, Artificial Sequence
  source: /note="Description of Artificial Sequence: Synthetic oligonucleotide"
agagcaagccacgacacaaac

SEQ ID NO: 37387 - DNA, 21 bp, Artificial Sequence
  source: /note="Description of Artificial Sequence: Synthetic oligonucleotide"
agagcaagcctcagagtcgaa

SEQ ID NO: 37388 - DNA, 21 bp, Artificial Sequence
  source: /note="Description of Artificial Sequence: Synthetic oligonucleotide"
agagcaagcaacagaccagac

SEQ ID NO: 37389 - DNA, 21 bp, Artificial Sequence
  source: /note="Description of Artificial Sequence: Synthetic oligonucleotide"
agagcaagcccaacaacaagc

SEQ ID NO: 37390 - DNA, 21 bp, Artificial Sequence
  source: /note="Description of Artificial Sequence: Synthetic oligonucleotide"
agagcaagcagcgaactccca

SEQ ID NO: 37391 - DNA, 21 bp, Artificial Sequence
  source: /note="Description of Artificial Sequence: Synthetic oligonucleotide"
agagcaagcagcagcgaagac

SEQ ID NO: 37392 - DNA, 21 bp, Artificial Sequence
  source: /note="Description of Artificial Sequence: Synthetic oligonucleotide"
agagcaagcagcgtcgacatg

SEQ ID NO: 37393 - DNA, 21 bp, Artificial Sequence
  source: /note="Description of Artificial Sequence: Synthetic oligonucleotide"
agagcaagcacaggaatggca

SEQ ID NO: 37394 - DNA, 21 bp, Artificial Sequence
  source: /note="Description of Artificial Sequence: Synthetic oligonucleotide"
agagcaagcacacacacactc

SEQ ID NO: 37395 - DNA, 21 bp, Artificial Sequence
  source: /note="Description of Artificial Sequence: Synthetic oligonucleotide"
agagcaacagaacacagcttc

SEQ ID NO: 37396 - DNA, 21 bp, Artificial Sequence
  source: /note="Description of Artificial Sequence: Synthetic oligonucleotide"
agagcaacagaaccagcattc

SEQ ID NO: 37397 - DNA, 21 bp, Artificial Sequence
  source: /note="Description of Artificial Sequence: Synthetic oligonucleotide"
agagcaacactcccaaaaaca

SEQ ID NO: 37398 - DNA, 21 bp, Artificial Sequence
  source: /note="Description of Artificial Sequence: Synthetic oligonucleotide"
agagcaacaaacgacagagca

SEQ ID NO: 37399 - DNA, 21 bp, Artificial Sequence
  source: /note="Description of Artificial Sequence: Synthetic oligonucleotide"
agagcaacaaacgacagcaca

SEQ ID NO: 37400 - DNA, 21 bp, Artificial Sequence
  source: /note="Description of Artificial Sequence: Synthetic oligonucleotide"
agagcaacaaacacaatcctc

SEQ ID NO: 37401 - DNA, 21 bp, Artificial Sequence
  source: /note="Description of Artificial Sequence: Synthetic oligonucleotide"
agagcaacaacaagcacattc

SEQ ID NO: 37402 - DNA, 21 bp, Artificial Sequence
  source: /note="Description of Artificial Sequence: Synthetic oligonucleotide"
agagcagtcgaagacagacac

SEQ ID NO: 37403 - DNA, 21 bp, Artificial Sequence
  source: /note="Description of Artificial Sequence: Synthetic oligonucleotide"
agagcagtcctcaacatcgga

SEQ ID NO: 37404 - DNA, 21 bp, Artificial Sequence
  source: /note="Description of Artificial Sequence: Synthetic oligonucleotide"
agagcagtccaaccaatgctc

SEQ ID NO: 37405 - DNA, 21 bp, Artificial Sequence
  source: /note="Description of Artificial Sequence: Synthetic oligonucleotide"
agagcagtcagcctccaagca

SEQ ID NO: 37406 - DNA, 21 bp, Artificial Sequence
  source: /note="Description of Artificial Sequence: Synthetic oligonucleotide"
agagcagtctaccaaacacaa

SEQ ID NO: 37407 - DNA, 21 bp, Artificial Sequence
  source: /note="Description of Artificial Sequence: Synthetic oligonucleotide"
agagcatacggaccaacaaac

SEQ ID NO: 37408 - DNA, 21 bp, Artificial Sequence
  source: /note="Description of Artificial Sequence: Synthetic oligonucleotide"
agagcatacatgacagaccca

SEQ ID NO: 37409 - DNA, 21 bp, Artificial Sequence
  source: /note="Description of Artificial Sequence: Synthetic oligonucleotide"
agagcatacaacgcagtcgtc

SEQ ID NO: 37410 - DNA, 21 bp, Artificial Sequence
  source: /note="Description of Artificial Sequence: Synthetic oligonucleotide"
agagcatacccagtcgacgac

SEQ ID NO: 37411 - DNA, 21 bp, Artificial Sequence
  source: /note="Description of Artificial Sequence: Synthetic oligonucleotide"
agagacgcagcaagcagctgc

SEQ ID NO: 37412 - DNA, 21 bp, Artificial Sequence
  source: /note="Description of Artificial Sequence: Synthetic oligonucleotide"
agagacgacagcagcctcctc

SEQ ID NO: 37413 - DNA, 21 bp, Artificial Sequence
  source: /note="Description of Artificial Sequence: Synthetic oligonucleotide"
agagacgacgtcagaacatac

SEQ ID NO: 37414 - DNA, 21 bp, Artificial Sequence
  source: /note="Description of Artificial Sequence: Synthetic oligonucleotide"
agagacggagaaatggaccca

SEQ ID NO: 37415 - DNA, 21 bp, Artificial Sequence
  source: /note="Description of Artificial Sequence: Synthetic oligonucleotide"
agagacggaaaatgggtcgca

SEQ ID NO: 37416 - DNA, 21 bp, Artificial Sequence
  source: /note="Description of Artificial Sequence: Synthetic oligonucleotide"
agagacggacaacacacaagc

SEQ ID NO: 37417 - DNA, 21 bp, Artificial Sequence
  source: /note="Description of Artificial Sequence: Synthetic oligonucleotide"
agagaccacctcacagtcgca

SEQ ID NO: 37418 - DNA, 21 bp, Artificial Sequence
  source: /note="Description of Artificial Sequence: Synthetic oligonucleotide"
agagacatcgcagcaaaaaca

SEQ ID NO: 37419 - DNA, 21 bp, Artificial Sequence
  source: /note="Description of Artificial Sequence: Synthetic oligonucleotide"
agagacaaaagcgaccacgca

SEQ ID NO: 37420 - DNA, 21 bp, Artificial Sequence
  source: /note="Description of Artificial Sequence: Synthetic oligonucleotide"
agagacctcaaaacacaaagc

SEQ ID NO: 37421 - DNA, 21 bp, Artificial Sequence
  source: /note="Description of Artificial Sequence: Synthetic oligonucleotide"
agagacctccaacacctcagc

SEQ ID NO: 37422 - DNA, 21 bp, Artificial Sequence
  source: /note="Description of Artificial Sequence: Synthetic oligonucleotide"
agagacctcagcagcgaaagc

SEQ ID NO: 37423 - DNA, 21 bp, Artificial Sequence
  source: /note="Description of Artificial Sequence: Synthetic oligonucleotide"
agagacaacaaagcaaacatc

SEQ ID NO: 37424 - DNA, 21 bp, Artificial Sequence
  source: /note="Description of Artificial Sequence: Synthetic oligonucleotide"
agagacaacagcagcgtcgtc

SEQ ID NO: 37425 - DNA, 21 bp, Artificial Sequence
  source: /note="Description of Artificial Sequence: Synthetic oligonucleotide"
agagacccaaacatcaaccca

SEQ ID NO: 37426 - DNA, 21 bp, Artificial Sequence
  source: /note="Description of Artificial Sequence: Synthetic oligonucleotide"
agagacccaagagcaggattc

SEQ ID NO: 37427 - DNA, 21 bp, Artificial Sequence
  source: /note="Description of Artificial Sequence: Synthetic oligonucleotide"
agagacccaagagcacacctc

SEQ ID NO: 37428 - DNA, 21 bp, Artificial Sequence
  source: /note="Description of Artificial Sequence: Synthetic oligonucleotide"
agagacccaagaggacaagga

SEQ ID NO: 37429 - DNA, 21 bp, Artificial Sequence
  source: /note="Description of Artificial Sequence: Synthetic oligonucleotide"
agagaccaagcaagcaaaaac

SEQ ID NO: 37430 - DNA, 21 bp, Artificial Sequence
  source: /note="Description of Artificial Sequence: Synthetic oligonucleotide"
agagaccaaggactcgaaagc

SEQ ID NO: 37431 - DNA, 21 bp, Artificial Sequence
  source: /note="Description of Artificial Sequence: Synthetic oligonucleotide"
agagaccaagtcgcaacacca

SEQ ID NO: 37432 - DNA, 21 bp, Artificial Sequence
  source: /note="Description of Artificial Sequence: Synthetic oligonucleotide"
agagacagagacccaacaagc

SEQ ID NO: 37433 - DNA, 21 bp, Artificial Sequence
  source: /note="Description of Artificial Sequence: Synthetic oligonucleotide"
agagacagagaaccagcactc

SEQ ID NO: 37434 - DNA, 21 bp, Artificial Sequence
  source: /note="Description of Artificial Sequence: Synthetic oligonucleotide"
agagacagagaagtcagctgg

SEQ ID NO: 37435 - DNA, 21 bp, Artificial Sequence
  source: /note="Description of Artificial Sequence: Synthetic oligonucleotide"
agagacagcgcattcgcagtc

SEQ ID NO: 37436 - DNA, 21 bp, Artificial Sequence
  source: /note="Description of Artificial Sequence: Synthetic oligonucleotide"
agagacagcaaaagcaacagc

SEQ ID NO: 37437 - DNA, 21 bp, Artificial Sequence
  source: /note="Description of Artificial Sequence: Synthetic oligonucleotide"
agagacagcaaagtcagccac

SEQ ID NO: 37438 - DNA, 21 bp, Artificial Sequence
  source: /note="Description of Artificial Sequence: Synthetic oligonucleotide"
agagacagcctcgaaacacaa

SEQ ID NO: 37439 - DNA, 21 bp, Artificial Sequence
  source: /note="Description of Artificial Sequence: Synthetic oligonucleotide"
agagacagcatgctcgtcgca

SEQ ID NO: 37440 - DNA, 21 bp, Artificial Sequence
  source: /note="Description of Artificial Sequence: Synthetic oligonucleotide"
agagacagcatgccagcagca

SEQ ID NO: 37441 - DNA, 21 bp, Artificial Sequence
  source: /note="Description of Artificial Sequence: Synthetic oligonucleotide"
agagacagcagaatgctcagc

SEQ ID NO: 37442 - DNA, 21 bp, Artificial Sequence
  source: /note="Description of Artificial Sequence: Synthetic oligonucleotide"
agagacagcagccacttccca

SEQ ID NO: 37443 - DNA, 21 bp, Artificial Sequence
  source: /note="Description of Artificial Sequence: Synthetic oligonucleotide"
agagacagcagcctctacctc

SEQ ID NO: 37444 - DNA, 21 bp, Artificial Sequence
  source: /note="Description of Artificial Sequence: Synthetic oligonucleotide"
agagacagcagctacacagac

SEQ ID NO: 37445 - DNA, 21 bp, Artificial Sequence
  source: /note="Description of Artificial Sequence: Synthetic oligonucleotide"
agagacacaatcatcagcgca

SEQ ID NO: 37446 - DNA, 21 bp, Artificial Sequence
  source: /note="Description of Artificial Sequence: Synthetic oligonucleotide"
agagacacaagcctcccagtc

SEQ ID NO: 37447 - DNA, 21 bp, Artificial Sequence
  source: /note="Description of Artificial Sequence: Synthetic oligonucleotide"
agagacacaagcagcatcgga

SEQ ID NO: 37448 - DNA, 21 bp, Artificial Sequence
  source: /note="Description of Artificial Sequence: Synthetic oligonucleotide"
agagacgtcgcagcaagaagc

SEQ ID NO: 37449 - DNA, 21 bp, Artificial Sequence
  source: /note="Description of Artificial Sequence: Synthetic oligonucleotide"
agagacgtcgcaatgcaagac

SEQ ID NO: 37450 - DNA, 21 bp, Artificial Sequence
  source: /note="Description of Artificial Sequence: Synthetic oligonucleotide"
agagacgtcccacaagcagtc

SEQ ID NO: 37451 - DNA, 21 bp, Artificial Sequence
  source: /note="Description of Artificial Sequence: Synthetic oligonucleotide"
agagacgtcagcggaccagtc

SEQ ID NO: 37452 - DNA, 21 bp, Artificial Sequence
  source: /note="Description of Artificial Sequence: Synthetic oligonucleotide"
agagacgtcagcatcccaagc

SEQ ID NO: 37453 - DNA, 21 bp, Artificial Sequence
  source: /note="Description of Artificial Sequence: Synthetic oligonucleotide"
agagacgtcagcagactccca

SEQ ID NO: 37454 - DNA, 21 bp, Artificial Sequence
  source: /note="Description of Artificial Sequence: Synthetic oligonucleotide"
agagacgtcacaagactccca

SEQ ID NO: 37455 - DNA, 21 bp, Artificial Sequence
  source: /note="Description of Artificial Sequence: Synthetic oligonucleotide"
agagaagcagcattcgcagac

SEQ ID NO: 37456 - DNA, 21 bp, Artificial Sequence
  source: /note="Description of Artificial Sequence: Synthetic oligonucleotide"
agagaagcaggaggagcaagc

SEQ ID NO: 37457 - DNA, 21 bp, Artificial Sequence
  source: /note="Description of Artificial Sequence: Synthetic oligonucleotide"
agagaagcaggaggactcgca

SEQ ID NO: 37458 - DNA, 21 bp, Artificial Sequence
  source: /note="Description of Artificial Sequence: Synthetic oligonucleotide"
agagaagcaaaaccagcatgg

SEQ ID NO: 37459 - DNA, 21 bp, Artificial Sequence
  source: /note="Description of Artificial Sequence: Synthetic oligonucleotide"
agagaagcagtcacaaaagca

SEQ ID NO: 37460 - DNA, 21 bp, Artificial Sequence
  source: /note="Description of Artificial Sequence: Synthetic oligonucleotide"
agagaagcatacgaaacacca

SEQ ID NO: 37461 - DNA, 21 bp, Artificial Sequence
  source: /note="Description of Artificial Sequence: Synthetic oligonucleotide"
agagaagacaacagcaacgac

SEQ ID NO: 37462 - DNA, 21 bp, Artificial Sequence
  source: /note="Description of Artificial Sequence: Synthetic oligonucleotide"
agagaaggaggacaaagcaga

SEQ ID NO: 37463 - DNA, 21 bp, Artificial Sequence
  source: /note="Description of Artificial Sequence: Synthetic oligonucleotide"
agagaaggactctacagccac

SEQ ID NO: 37464 - DNA, 21 bp, Artificial Sequence
  source: /note="Description of Artificial Sequence: Synthetic oligonucleotide"
agagaaatcggatgcacagga

SEQ ID NO: 37465 - DNA, 21 bp, Artificial Sequence
  source: /note="Description of Artificial Sequence: Synthetic oligonucleotide"
agagaaaaaacagacagattc

SEQ ID NO: 37466 - DNA, 21 bp, Artificial Sequence
  source: /note="Description of Artificial Sequence: Synthetic oligonucleotide"
agagaactcgaaggattcaca

SEQ ID NO: 37467 - DNA, 21 bp, Artificial Sequence
  source: /note="Description of Artificial Sequence: Synthetic oligonucleotide"
agagaactcagcccaatgtac

SEQ ID NO: 37468 - DNA, 21 bp, Artificial Sequence
  source: /note="Description of Artificial Sequence: Synthetic oligonucleotide"
agagaactcagctacgcaagc

SEQ ID NO: 37469 - DNA, 21 bp, Artificial Sequence
  source: /note="Description of Artificial Sequence: Synthetic oligonucleotide"
agagaaatgctcccaagcagc

SEQ ID NO: 37470 - DNA, 21 bp, Artificial Sequence
  source: /note="Description of Artificial Sequence: Synthetic oligonucleotide"
agagaaaacggactcagcctc

SEQ ID NO: 37471 - DNA, 21 bp, Artificial Sequence
  source: /note="Description of Artificial Sequence: Synthetic oligonucleotide"
agagaaaacctcgcagcagga

SEQ ID NO: 37472 - DNA, 21 bp, Artificial Sequence
  source: /note="Description of Artificial Sequence: Synthetic oligonucleotide"
agagaaaacaacacagtcaaa

SEQ ID NO: 37473 - DNA, 21 bp, Artificial Sequence
  source: /note="Description of Artificial Sequence: Synthetic oligonucleotide"
agagaaccacacacaagcaac

SEQ ID NO: 37474 - DNA, 21 bp, Artificial Sequence
  source: /note="Description of Artificial Sequence: Synthetic oligonucleotide"
agagaaccaccaacactcagc

SEQ ID NO: 37475 - DNA, 21 bp, Artificial Sequence
  source: /note="Description of Artificial Sequence: Synthetic oligonucleotide"
agagaacaattcagaaacctc

SEQ ID NO: 37476 - DNA, 21 bp, Artificial Sequence
  source: /note="Description of Artificial Sequence: Synthetic oligonucleotide"
agagaaagaagcgcactcaca

SEQ ID NO: 37477 - DNA, 21 bp, Artificial Sequence
  source: /note="Description of Artificial Sequence: Synthetic oligonucleotide"
agagaaagaagcccaatgcca

SEQ ID NO: 37478 - DNA, 21 bp, Artificial Sequence
  source: /note="Description of Artificial Sequence: Synthetic oligonucleotide"
agagaaagctgcccagacgca

SEQ ID NO: 37479 - DNA, 21 bp, Artificial Sequence
  source: /note="Description of Artificial Sequence: Synthetic oligonucleotide"
agagaaagccacaaaggacca

SEQ ID NO: 37480 - DNA, 21 bp, Artificial Sequence
  source: /note="Description of Artificial Sequence: Synthetic oligonucleotide"
agagaaagcctcaacaacatg

SEQ ID NO: 37481 - DNA, 21 bp, Artificial Sequence
  source: /note="Description of Artificial Sequence: Synthetic oligonucleotide"
agagaaagcacaacacacgga

SEQ ID NO: 37482 - DNA, 21 bp, Artificial Sequence
  source: /note="Description of Artificial Sequence: Synthetic oligonucleotide"
agagaaagcgtcagcatcaac

SEQ ID NO: 37483 - DNA, 21 bp, Artificial Sequence
  source: /note="Description of Artificial Sequence: Synthetic oligonucleotide"
agagaaagctacgaaagcgga

SEQ ID NO: 37484 - DNA, 21 bp, Artificial Sequence
  source: /note="Description of Artificial Sequence: Synthetic oligonucleotide"
agagaaacactcggaagccca

SEQ ID NO: 37485 - DNA, 21 bp, Artificial Sequence
  source: /note="Description of Artificial Sequence: Synthetic oligonucleotide"
agagaaacaatggcaagcaca

SEQ ID NO: 37486 - DNA, 21 bp, Artificial Sequence
  source: /note="Description of Artificial Sequence: Synthetic oligonucleotide"
agagaaacaccaaacatccca

SEQ ID NO: 37487 - DNA, 21 bp, Artificial Sequence
  source: /note="Description of Artificial Sequence: Synthetic oligonucleotide"
agagaaacaagcagcagccaa

SEQ ID NO: 37488 - DNA, 21 bp, Artificial Sequence
  source: /note="Description of Artificial Sequence: Synthetic oligonucleotide"
agagaaacagtcagaaacgtc

SEQ ID NO: 37489 - DNA, 21 bp, Artificial Sequence
  source: /note="Description of Artificial Sequence: Synthetic oligonucleotide"
agagaagtcctcagcacatgc

SEQ ID NO: 37490 - DNA, 21 bp, Artificial Sequence
  source: /note="Description of Artificial Sequence: Synthetic oligonucleotide"
agagaagtcagcgcaagccca

SEQ ID NO: 37491 - DNA, 21 bp, Artificial Sequence
  source: /note="Description of Artificial Sequence: Synthetic oligonucleotide"
agagaagtcagcttcgactgg

SEQ ID NO: 37492 - DNA, 21 bp, Artificial Sequence
  source: /note="Description of Artificial Sequence: Synthetic oligonucleotide"
agagaatacccaagcggaagc

SEQ ID NO: 37493 - DNA, 21 bp, Artificial Sequence
  source: /note="Description of Artificial Sequence: Synthetic oligonucleotide"
agattcgcagaaacaagacca

SEQ ID NO: 37494 - DNA, 21 bp, Artificial Sequence
  source: /note="Description of Artificial Sequence: Synthetic oligonucleotide"
agattcgcaggagcaggagtc

SEQ ID NO: 37495 - DNA, 21 bp, Artificial Sequence
  source: /note="Description of Artificial Sequence: Synthetic oligonucleotide"
agattcgcaggaagcctcatc

SEQ ID NO: 37496 - DNA, 21 bp, Artificial Sequence
  source: /note="Description of Artificial Sequence: Synthetic oligonucleotide"
agattcgcaaacagcggagtc

SEQ ID NO: 37497 - DNA, 21 bp, Artificial Sequence
  source: /note="Description of Artificial Sequence: Synthetic oligonucleotide"
agattcgaactcgcacacaac

SEQ ID NO: 37498 - DNA, 21 bp, Artificial Sequence
  source: /note="Description of Artificial Sequence: Synthetic oligonucleotide"
agattcgaaagcagcgtccca

SEQ ID NO: 37499 - DNA, 21 bp, Artificial Sequence
  source: /note="Description of Artificial Sequence: Synthetic oligonucleotide"
agattccacgcagcaacaagc

SEQ ID NO: 37500 - DNA, 21 bp, Artificial Sequence
  source: /note="Description of Artificial Sequence: Synthetic oligonucleotide"
agattcaaagaaatgccaatg

SEQ ID NO: 37501 - DNA, 21 bp, Artificial Sequence
  source: /note="Description of Artificial Sequence: Synthetic oligonucleotide"
agattcaaaacaacaggagaa

SEQ ID NO: 37502 - DNA, 21 bp, Artificial Sequence
  source: /note="Description of Artificial Sequence: Synthetic oligonucleotide"
agattcccacaaccagaccca

SEQ ID NO: 37503 - DNA, 21 bp, Artificial Sequence
  source: /note="Description of Artificial Sequence: Synthetic oligonucleotide"
agattcccagtcgacggagtc

SEQ ID NO: 37504 - DNA, 21 bp, Artificial Sequence
  source: /note="Description of Artificial Sequence: Synthetic oligonucleotide"
agattcagcgacagcagaatg

SEQ ID NO: 37505 - DNA, 21 bp, Artificial Sequence
  source: /note="Description of Artificial Sequence: Synthetic oligonucleotide"
agattcagcggaatggtcgaa

SEQ ID NO: 37506 - DNA, 21 bp, Artificial Sequence
  source: /note="Description of Artificial Sequence: Synthetic oligonucleotide"
agattcagccaaagcccagca

SEQ ID NO: 37507 - DNA, 21 bp, Artificial Sequence
  source: /note="Description of Artificial Sequence: Synthetic oligonucleotide"
agattcagcacaggaccaagc

SEQ ID NO: 37508 - DNA, 21 bp, Artificial Sequence
  source: /note="Description of Artificial Sequence: Synthetic oligonucleotide"
agattcagcacacaacaaagc

SEQ ID NO: 37509 - DNA, 21 bp, Artificial Sequence
  source: /note="Description of Artificial Sequence: Synthetic oligonucleotide"
agattcgtcccagacagacca

SEQ ID NO: 37510 - DNA, 21 bp, Artificial Sequence
  source: /note="Description of Artificial Sequence: Synthetic oligonucleotide"
agaggagcagcaccagtcaca

SEQ ID NO: 37511 - DNA, 21 bp, Artificial Sequence
  source: /note="Description of Artificial Sequence: Synthetic oligonucleotide"
agaggagcagaactcggagga

SEQ ID NO: 37512 - DNA, 21 bp, Artificial Sequence
  source: /note="Description of Artificial Sequence: Synthetic oligonucleotide"
agaggagcaggagacgcacac

SEQ ID NO: 37513 - DNA, 21 bp, Artificial Sequence
  source: /note="Description of Artificial Sequence: Synthetic oligonucleotide"
agaggagcaggaccaagcaca

SEQ ID NO: 37514 - DNA, 21 bp, Artificial Sequence
  source: /note="Description of Artificial Sequence: Synthetic oligonucleotide"
agaggagcaatcgcaacaagc

SEQ ID NO: 37515 - DNA, 21 bp, Artificial Sequence
  source: /note="Description of Artificial Sequence: Synthetic oligonucleotide"
agaggagcaatcggaaacgga

SEQ ID NO: 37516 - DNA, 21 bp, Artificial Sequence
  source: /note="Description of Artificial Sequence: Synthetic oligonucleotide"
agaggagcaatcccactccca

SEQ ID NO: 37517 - DNA, 21 bp, Artificial Sequence
  source: /note="Description of Artificial Sequence: Synthetic oligonucleotide"
agaggagcaacagtcgcacca

SEQ ID NO: 37518 - DNA, 21 bp, Artificial Sequence
  source: /note="Description of Artificial Sequence: Synthetic oligonucleotide"
agaggagacggagtcagcctc

SEQ ID NO: 37519 - DNA, 21 bp, Artificial Sequence
  source: /note="Description of Artificial Sequence: Synthetic oligonucleotide"
agaggagacccaggactcgga

SEQ ID NO: 37520 - DNA, 21 bp, Artificial Sequence
  source: /note="Description of Artificial Sequence: Synthetic oligonucleotide"
agaggagaaaacagcaaccca

SEQ ID NO: 37521 - DNA, 21 bp, Artificial Sequence
  source: /note="Description of Artificial Sequence: Synthetic oligonucleotide"
agaggagaaagaagcgtcttc

SEQ ID NO: 37522 - DNA, 21 bp, Artificial Sequence
  source: /note="Description of Artificial Sequence: Synthetic oligonucleotide"
agaggagaaagcgcaagcaca

SEQ ID NO: 37523 - DNA, 21 bp, Artificial Sequence
  source: /note="Description of Artificial Sequence: Synthetic oligonucleotide"
agaggaggaggactcagcatg

SEQ ID NO: 37524 - DNA, 21 bp, Artificial Sequence
  source: /note="Description of Artificial Sequence: Synthetic oligonucleotide"
agaggaggaacaatgacaatc

SEQ ID NO: 37525 - DNA, 21 bp, Artificial Sequence
  source: /note="Description of Artificial Sequence: Synthetic oligonucleotide"
agaggaggaacaaacgtcgaa

SEQ ID NO: 37526 - DNA, 21 bp, Artificial Sequence
  source: /note="Description of Artificial Sequence: Synthetic oligonucleotide"
agaggacaccacgacaacgaa

SEQ ID NO: 37527 - DNA, 21 bp, Artificial Sequence
  source: /note="Description of Artificial Sequence: Synthetic oligonucleotide"
agaggacacctcagcgaccca

SEQ ID NO: 37528 - DNA, 21 bp, Artificial Sequence
  source: /note="Description of Artificial Sequence: Synthetic oligonucleotide"
agaggaatcgaactcagagga

SEQ ID NO: 37529 - DNA, 21 bp, Artificial Sequence
  source: /note="Description of Artificial Sequence: Synthetic oligonucleotide"
agaggaatcgaactcacagtc

SEQ ID NO: 37530 - DNA, 21 bp, Artificial Sequence
  source: /note="Description of Artificial Sequence: Synthetic oligonucleotide"
agaggaatcccagcaatcgca

SEQ ID NO: 37531 - DNA, 21 bp, Artificial Sequence
  source: /note="Description of Artificial Sequence: Synthetic oligonucleotide"
agaggaaaagaaccattccca

SEQ ID NO: 37532 - DNA, 21 bp, Artificial Sequence
  source: /note="Description of Artificial Sequence: Synthetic oligonucleotide"
agaggactcggaaacggaaca

SEQ ID NO: 37533 - DNA, 21 bp, Artificial Sequence
  source: /note="Description of Artificial Sequence: Synthetic oligonucleotide"
agaggaatggcagtcccagga

SEQ ID NO: 37534 - DNA, 21 bp, Artificial Sequence
  source: /note="Description of Artificial Sequence: Synthetic oligonucleotide"
agaggaaacgaatggagcctc

SEQ ID NO: 37535 - DNA, 21 bp, Artificial Sequence
  source: /note="Description of Artificial Sequence: Synthetic oligonucleotide"
agaggaccagcaacagcaagc

SEQ ID NO: 37536 - DNA, 21 bp, Artificial Sequence
  source: /note="Description of Artificial Sequence: Synthetic oligonucleotide"
agaggaccagacacaggagca

SEQ ID NO: 37537 - DNA, 21 bp, Artificial Sequence
  source: /note="Description of Artificial Sequence: Synthetic oligonucleotide"
agaggaccaggagaaccaaac

SEQ ID NO: 37538 - DNA, 21 bp, Artificial Sequence
  source: /note="Description of Artificial Sequence: Synthetic oligonucleotide"
agaggaccactcacaagcgaa

SEQ ID NO: 37539 - DNA, 21 bp, Artificial Sequence
  source: /note="Description of Artificial Sequence: Synthetic oligonucleotide"
agaggaccaccaccagcaaca

SEQ ID NO: 37540 - DNA, 21 bp, Artificial Sequence
  source: /note="Description of Artificial Sequence: Synthetic oligonucleotide"
agaggaccaagcacaagcgac

SEQ ID NO: 37541 - DNA, 21 bp, Artificial Sequence
  source: /note="Description of Artificial Sequence: Synthetic oligonucleotide"
agaggaccagtcacaagagac

SEQ ID NO: 37542 - DNA, 21 bp, Artificial Sequence
  source: /note="Description of Artificial Sequence: Synthetic oligonucleotide"
agaggacaacacaacctcagc

SEQ ID NO: 37543 - DNA, 21 bp, Artificial Sequence
  source: /note="Description of Artificial Sequence: Synthetic oligonucleotide"
agaggacaaacaatcagagaa

SEQ ID NO: 37544 - DNA, 21 bp, Artificial Sequence
  source: /note="Description of Artificial Sequence: Synthetic oligonucleotide"
agaggaagcgcaggagtcgca

SEQ ID NO: 37545 - DNA, 21 bp, Artificial Sequence
  source: /note="Description of Artificial Sequence: Synthetic oligonucleotide"
agaggaagcgacgcaagcgca

SEQ ID NO: 37546 - DNA, 21 bp, Artificial Sequence
  source: /note="Description of Artificial Sequence: Synthetic oligonucleotide"
agaggaagcggaacactcaca

SEQ ID NO: 37547 - DNA, 21 bp, Artificial Sequence
  source: /note="Description of Artificial Sequence: Synthetic oligonucleotide"
agaggaagcatgctcggagac

SEQ ID NO: 37548 - DNA, 21 bp, Artificial Sequence
  source: /note="Description of Artificial Sequence: Synthetic oligonucleotide"
agaggaagcaacgcaagcgga

SEQ ID NO: 37549 - DNA, 21 bp, Artificial Sequence
  source: /note="Description of Artificial Sequence: Synthetic oligonucleotide"
agaggaagcccagcagcaaca

SEQ ID NO: 37550 - DNA, 21 bp, Artificial Sequence
  source: /note="Description of Artificial Sequence: Synthetic oligonucleotide"
agaggaagcccacaaagcagc

SEQ ID NO: 37551 - DNA, 21 bp, Artificial Sequence
  source: /note="Description of Artificial Sequence: Synthetic oligonucleotide"
agaggaagccaaacaggaaac

SEQ ID NO: 37552 - DNA, 21 bp, Artificial Sequence
  source: /note="Description of Artificial Sequence: Synthetic oligonucleotide"
agaggaagccaaacaagcttc

SEQ ID NO: 37553 - DNA, 21 bp, Artificial Sequence
  source: /note="Description of Artificial Sequence: Synthetic oligonucleotide"
agaggaagcagcacaatcgaa

SEQ ID NO: 37554 - DNA, 21 bp, Artificial Sequence
  source: /note="Description of Artificial Sequence: Synthetic oligonucleotide"
agaggaagcacagcaaacgca

SEQ ID NO: 37555 - DNA, 21 bp, Artificial Sequence
  source: /note="Description of Artificial Sequence: Synthetic oligonucleotide"
agaggaagcacagtcatgttc

SEQ ID NO: 37556 - DNA, 21 bp, Artificial Sequence
  source: /note="Description of Artificial Sequence: Synthetic oligonucleotide"
agaggaacagcacacctcctc

SEQ ID NO: 37557 - DNA, 21 bp, Artificial Sequence
  source: /note="Description of Artificial Sequence: Synthetic oligonucleotide"
agaggaacagaaagcccaagc

SEQ ID NO: 37558 - DNA, 21 bp, Artificial Sequence
  source: /note="Description of Artificial Sequence: Synthetic oligonucleotide"
agaggaacaggaaacctcaac

SEQ ID NO: 37559 - DNA, 21 bp, Artificial Sequence
  source: /note="Description of Artificial Sequence: Synthetic oligonucleotide"
agaggaacaggaacagcatgg

SEQ ID NO: 37560 - DNA, 21 bp, Artificial Sequence
  source: /note="Description of Artificial Sequence: Synthetic oligonucleotide"
agaggaacaatgatggcagca

SEQ ID NO: 37561 - DNA, 21 bp, Artificial Sequence
  source: /note="Description of Artificial Sequence: Synthetic oligonucleotide"
agaggaacaaacacactccaa

SEQ ID NO: 37562 - DNA, 21 bp, Artificial Sequence
  source: /note="Description of Artificial Sequence: Synthetic oligonucleotide"
agaggagtcgcagtcccacca

SEQ ID NO: 37563 - DNA, 21 bp, Artificial Sequence
  source: /note="Description of Artificial Sequence: Synthetic oligonucleotide"
agaggagtccacagcccagac

SEQ ID NO: 37564 - DNA, 21 bp, Artificial Sequence
  source: /note="Description of Artificial Sequence: Synthetic oligonucleotide"
agaggagtcatgtacggagac

SEQ ID NO: 37565 - DNA, 21 bp, Artificial Sequence
  source: /note="Description of Artificial Sequence: Synthetic oligonucleotide"
agacacgcaggacaagacaac

SEQ ID NO: 37566 - DNA, 21 bp, Artificial Sequence
  source: /note="Description of Artificial Sequence: Synthetic oligonucleotide"
agacacgcaccagtcgcaagc

SEQ ID NO: 37567 - DNA, 21 bp, Artificial Sequence
  source: /note="Description of Artificial Sequence: Synthetic oligonucleotide"
agacacgcagtcagcaacttc

SEQ ID NO: 37568 - DNA, 21 bp, Artificial Sequence
  source: /note="Description of Artificial Sequence: Synthetic oligonucleotide"
agacacgacagaatggacaac

SEQ ID NO: 37569 - DNA, 21 bp, Artificial Sequence
  source: /note="Description of Artificial Sequence: Synthetic oligonucleotide"
agacacgaactccacagcaca

SEQ ID NO: 37570 - DNA, 21 bp, Artificial Sequence
  source: /note="Description of Artificial Sequence: Synthetic oligonucleotide"
agacacgaaaacatcagagac

SEQ ID NO: 37571 - DNA, 21 bp, Artificial Sequence
  source: /note="Description of Artificial Sequence: Synthetic oligonucleotide"
agacacgaaagaccaatggca

SEQ ID NO: 37572 - DNA, 21 bp, Artificial Sequence
  source: /note="Description of Artificial Sequence: Synthetic oligonucleotide"
agacacggaagcagcatgaca

SEQ ID NO: 37573 - DNA, 21 bp, Artificial Sequence
  source: /note="Description of Artificial Sequence: Synthetic oligonucleotide"
agacacggaacacacccaagc

SEQ ID NO: 37574 - DNA, 21 bp, Artificial Sequence
  source: /note="Description of Artificial Sequence: Synthetic oligonucleotide"
agacaccacagcgcaccaaac

SEQ ID NO: 37575 - DNA, 21 bp, Artificial Sequence
  source: /note="Description of Artificial Sequence: Synthetic oligonucleotide"
agacacctcggaagcctccca

SEQ ID NO: 37576 - DNA, 21 bp, Artificial Sequence
  source: /note="Description of Artificial Sequence: Synthetic oligonucleotide"
agacacccagcagcacacgca

SEQ ID NO: 37577 - DNA, 21 bp, Artificial Sequence
  source: /note="Description of Artificial Sequence: Synthetic oligonucleotide"
agacacccagcaacaatcagc

SEQ ID NO: 37578 - DNA, 21 bp, Artificial Sequence
  source: /note="Description of Artificial Sequence: Synthetic oligonucleotide"
agacacccaatgctcacagga

SEQ ID NO: 37579 - DNA, 21 bp, Artificial Sequence
  source: /note="Description of Artificial Sequence: Synthetic oligonucleotide"
agacacccaccaaacagcttc

SEQ ID NO: 37580 - DNA, 21 bp, Artificial Sequence
  source: /note="Description of Artificial Sequence: Synthetic oligonucleotide"
agacacccaagcacaccaaac

SEQ ID NO: 37581 - DNA, 21 bp, Artificial Sequence
  source: /note="Description of Artificial Sequence: Synthetic oligonucleotide"
agacacccagtcacagaacca

SEQ ID NO: 37582 - DNA, 21 bp, Artificial Sequence
  source: /note="Description of Artificial Sequence: Synthetic oligonucleotide"
agacaccaaacaatcatcgca

SEQ ID NO: 37583 - DNA, 21 bp, Artificial Sequence
  source: /note="Description of Artificial Sequence: Synthetic oligonucleotide"
agacacagaccagcaccagaa

SEQ ID NO: 37584 - DNA, 21 bp, Artificial Sequence
  source: /note="Description of Artificial Sequence: Synthetic oligonucleotide"
agacacagcgaagtcacattc

SEQ ID NO: 37585 - DNA, 21 bp, Artificial Sequence
  source: /note="Description of Artificial Sequence: Synthetic oligonucleotide"
agacacagccacacaatcagc

SEQ ID NO: 37586 - DNA, 21 bp, Artificial Sequence
  source: /note="Description of Artificial Sequence: Synthetic oligonucleotide"
agacacagcctcagcctcgac

SEQ ID NO: 37587 - DNA, 21 bp, Artificial Sequence
  source: /note="Description of Artificial Sequence: Synthetic oligonucleotide"
agacacagcaaccaaacactc

SEQ ID NO: 37588 - DNA, 21 bp, Artificial Sequence
  source: /note="Description of Artificial Sequence: Synthetic oligonucleotide"
agacacagcccactcacagga

SEQ ID NO: 37589 - DNA, 21 bp, Artificial Sequence
  source: /note="Description of Artificial Sequence: Synthetic oligonucleotide"
agacacagccaaggaccattc

SEQ ID NO: 37590 - DNA, 21 bp, Artificial Sequence
  source: /note="Description of Artificial Sequence: Synthetic oligonucleotide"
agacacacaatggaaacaagc

SEQ ID NO: 37591 - DNA, 21 bp, Artificial Sequence
  source: /note="Description of Artificial Sequence: Synthetic oligonucleotide"
agacacacaccagaccaagga

SEQ ID NO: 37592 - DNA, 21 bp, Artificial Sequence
  source: /note="Description of Artificial Sequence: Synthetic oligonucleotide"
agaatcgcaccaacaggaaac

SEQ ID NO: 37593 - DNA, 21 bp, Artificial Sequence
  source: /note="Description of Artificial Sequence: Synthetic oligonucleotide"
agaatcgacgcagaactcgaa

SEQ ID NO: 37594 - DNA, 21 bp, Artificial Sequence
  source: /note="Description of Artificial Sequence: Synthetic oligonucleotide"
agaatcgacggaatcctcagc

SEQ ID NO: 37595 - DNA, 21 bp, Artificial Sequence
  source: /note="Description of Artificial Sequence: Synthetic oligonucleotide"
agaatcgaaaacgaagtcgtc

SEQ ID NO: 37596 - DNA, 21 bp, Artificial Sequence
  source: /note="Description of Artificial Sequence: Synthetic oligonucleotide"
agaatcggagaccacatcaga

SEQ ID NO: 37597 - DNA, 21 bp, Artificial Sequence
  source: /note="Description of Artificial Sequence: Synthetic oligonucleotide"
agaatcggaaaaaacgacagc

SEQ ID NO: 37598 - DNA, 21 bp, Artificial Sequence
  source: /note="Description of Artificial Sequence: Synthetic oligonucleotide"
agaatcggacaaaacctcgca

SEQ ID NO: 37599 - DNA, 21 bp, Artificial Sequence
  source: /note="Description of Artificial Sequence: Synthetic oligonucleotide"
agaatcggacaaacattcgca

SEQ ID NO: 37600 - DNA, 21 bp, Artificial Sequence
  source: /note="Description of Artificial Sequence: Synthetic oligonucleotide"
agaatcggaagcggaacagga

SEQ ID NO: 37601 - DNA, 21 bp, Artificial Sequence
  source: /note="Description of Artificial Sequence: Synthetic oligonucleotide"
agaatcggatggacaatcgac

SEQ ID NO: 37602 - DNA, 21 bp, Artificial Sequence
  source: /note="Description of Artificial Sequence: Synthetic oligonucleotide"
agaatccactacgaaggaatg

SEQ ID NO: 37603 - DNA, 21 bp, Artificial Sequence
  source: /note="Description of Artificial Sequence: Synthetic oligonucleotide"
agaatcaacatcgcagaaaca

SEQ ID NO: 37604 - DNA, 21 bp, Artificial Sequence
  source: /note="Description of Artificial Sequence: Synthetic oligonucleotide"
agaatcccagcactcagcgga

SEQ ID NO: 37605 - DNA, 21 bp, Artificial Sequence
  source: /note="Description of Artificial Sequence: Synthetic oligonucleotide"
agaatcccaacaagcccacca

SEQ ID NO: 37606 - DNA, 21 bp, Artificial Sequence
  source: /note="Description of Artificial Sequence: Synthetic oligonucleotide"
agaatcccagtcagagtcgac

SEQ ID NO: 37607 - DNA, 21 bp, Artificial Sequence
  source: /note="Description of Artificial Sequence: Synthetic oligonucleotide"
agaatcagatacccagaagga

SEQ ID NO: 37608 - DNA, 21 bp, Artificial Sequence
  source: /note="Description of Artificial Sequence: Synthetic oligonucleotide"
agaatcagcgcactccaacca

SEQ ID NO: 37609 - DNA, 21 bp, Artificial Sequence
  source: /note="Description of Artificial Sequence: Synthetic oligonucleotide"
agaatcagcgactacccacca

SEQ ID NO: 37610 - DNA, 21 bp, Artificial Sequence
  source: /note="Description of Artificial Sequence: Synthetic oligonucleotide"
agaatcagcggacacgcaagc

SEQ ID NO: 37611 - DNA, 21 bp, Artificial Sequence
  source: /note="Description of Artificial Sequence: Synthetic oligonucleotide"
agaatcagcccaacaccaatc

SEQ ID NO: 37612 - DNA, 21 bp, Artificial Sequence
  source: /note="Description of Artificial Sequence: Synthetic oligonucleotide"
agaatcagcagcggaatcgac

SEQ ID NO: 37613 - DNA, 21 bp, Artificial Sequence
  source: /note="Description of Artificial Sequence: Synthetic oligonucleotide"
agaatcagcagcagcccagac

SEQ ID NO: 37614 - DNA, 21 bp, Artificial Sequence
  source: /note="Description of Artificial Sequence: Synthetic oligonucleotide"
agaatctacgaccaaagcatc

SEQ ID NO: 37615 - DNA, 21 bp, Artificial Sequence
  source: /note="Description of Artificial Sequence: Synthetic oligonucleotide"
agaatctacagcccagacgga

SEQ ID NO: 37616 - DNA, 21 bp, Artificial Sequence
  source: /note="Description of Artificial Sequence: Synthetic oligonucleotide"
agaatctacacaacaagccca

SEQ ID NO: 37617 - DNA, 21 bp, Artificial Sequence
  source: /note="Description of Artificial Sequence: Synthetic oligonucleotide"
agaaaagacgacacaacatgg

SEQ ID NO: 37618 - DNA, 21 bp, Artificial Sequence
  source: /note="Description of Artificial Sequence: Synthetic oligonucleotide"
agaaaagacctcagctgggac

SEQ ID NO: 37619 - DNA, 21 bp, Artificial Sequence
  source: /note="Description of Artificial Sequence: Synthetic oligonucleotide"
agaaaagacagaagcccagaa

SEQ ID NO: 37620 - DNA, 21 bp, Artificial Sequence
  source: /note="Description of Artificial Sequence: Synthetic oligonucleotide"
agaaaagacacaccaatgcac

SEQ ID NO: 37621 - DNA, 21 bp, Artificial Sequence
  source: /note="Description of Artificial Sequence: Synthetic oligonucleotide"
agaaaagacacagtcccaaac

SEQ ID NO: 37622 - DNA, 21 bp, Artificial Sequence
  source: /note="Description of Artificial Sequence: Synthetic oligonucleotide"
agaaaaggactcgacgacgca

SEQ ID NO: 37623 - DNA, 21 bp, Artificial Sequence
  source: /note="Description of Artificial Sequence: Synthetic oligonucleotide"
agaaaactcccactcgtcgac

SEQ ID NO: 37624 - DNA, 21 bp, Artificial Sequence
  source: /note="Description of Artificial Sequence: Synthetic oligonucleotide"
agaaaaatgaaccaagaccaa

SEQ ID NO: 37625 - DNA, 21 bp, Artificial Sequence
  source: /note="Description of Artificial Sequence: Synthetic oligonucleotide"
agaaaaaactaccaactcgac

SEQ ID NO: 37626 - DNA, 21 bp, Artificial Sequence
  source: /note="Description of Artificial Sequence: Synthetic oligonucleotide"
agaaaaccactcacagcacca

SEQ ID NO: 37627 - DNA, 21 bp, Artificial Sequence
  source: /note="Description of Artificial Sequence: Synthetic oligonucleotide"
agaaaaagcccacaagaagca

SEQ ID NO: 37628 - DNA, 21 bp, Artificial Sequence
  source: /note="Description of Artificial Sequence: Synthetic oligonucleotide"
agaaaaagcacactcgacaca

SEQ ID NO: 37629 - DNA, 21 bp, Artificial Sequence
  source: /note="Description of Artificial Sequence: Synthetic oligonucleotide"
agaaaagtcgaaagcagaaga

SEQ ID NO: 37630 - DNA, 21 bp, Artificial Sequence
  source: /note="Description of Artificial Sequence: Synthetic oligonucleotide"
agaaaagtcacaccagacaca

SEQ ID NO: 37631 - DNA, 21 bp, Artificial Sequence
  source: /note="Description of Artificial Sequence: Synthetic oligonucleotide"
agactcgcagcagaaacactc

SEQ ID NO: 37632 - DNA, 21 bp, Artificial Sequence
  source: /note="Description of Artificial Sequence: Synthetic oligonucleotide"
agactcgcagcaaaccacctc

SEQ ID NO: 37633 - DNA, 21 bp, Artificial Sequence
  source: /note="Description of Artificial Sequence: Synthetic oligonucleotide"
agactcgcagaaacaagccac

SEQ ID NO: 37634 - DNA, 21 bp, Artificial Sequence
  source: /note="Description of Artificial Sequence: Synthetic oligonucleotide"
agactcgcactcgaaagcaac

SEQ ID NO: 37635 - DNA, 21 bp, Artificial Sequence
  source: /note="Description of Artificial Sequence: Synthetic oligonucleotide"
agactcgcaatgcaagcagca

SEQ ID NO: 37636 - DNA, 21 bp, Artificial Sequence
  source: /note="Description of Artificial Sequence: Synthetic oligonucleotide"
agactcgcacaaatcaacagc

SEQ ID NO: 37637 - DNA, 21 bp, Artificial Sequence
  source: /note="Description of Artificial Sequence: Synthetic oligonucleotide"
agactcgcaacagaagaccca

SEQ ID NO: 37638 - DNA, 21 bp, Artificial Sequence
  source: /note="Description of Artificial Sequence: Synthetic oligonucleotide"
agactcgacgcaaacagcaga

SEQ ID NO: 37639 - DNA, 21 bp, Artificial Sequence
  source: /note="Description of Artificial Sequence: Synthetic oligonucleotide"
agactcgacgacgtcggactc

SEQ ID NO: 37640 - DNA, 21 bp, Artificial Sequence
  source: /note="Description of Artificial Sequence: Synthetic oligonucleotide"
agactcgacttcgacacacca

SEQ ID NO: 37641 - DNA, 21 bp, Artificial Sequence
  source: /note="Description of Artificial Sequence: Synthetic oligonucleotide"
agactcgacatgagaatcgaa

SEQ ID NO: 37642 - DNA, 21 bp, Artificial Sequence
  source: /note="Description of Artificial Sequence: Synthetic oligonucleotide"
agactcgacccaggagaacca

SEQ ID NO: 37643 - DNA, 21 bp, Artificial Sequence
  source: /note="Description of Artificial Sequence: Synthetic oligonucleotide"
agactcgacccacacagcagc

SEQ ID NO: 37644 - DNA, 21 bp, Artificial Sequence
  source: /note="Description of Artificial Sequence: Synthetic oligonucleotide"
agactcgacagcctcgcactc

SEQ ID NO: 37645 - DNA, 21 bp, Artificial Sequence
  source: /note="Description of Artificial Sequence: Synthetic oligonucleotide"
agactcgacagcatgttcagc

SEQ ID NO: 37646 - DNA, 21 bp, Artificial Sequence
  source: /note="Description of Artificial Sequence: Synthetic oligonucleotide"
agactcgacacaacaatgcaa

SEQ ID NO: 37647 - DNA, 21 bp, Artificial Sequence
  source: /note="Description of Artificial Sequence: Synthetic oligonucleotide"
agactcgacacagtcagcagc

SEQ ID NO: 37648 - DNA, 21 bp, Artificial Sequence
  source: /note="Description of Artificial Sequence: Synthetic oligonucleotide"
agactcgaagcacaagtcgca

SEQ ID NO: 37649 - DNA, 21 bp, Artificial Sequence
  source: /note="Description of Artificial Sequence: Synthetic oligonucleotide"
agactcgaaccaatgcaaaac

SEQ ID NO: 37650 - DNA, 21 bp, Artificial Sequence
  source: /note="Description of Artificial Sequence: Synthetic oligonucleotide"
agactcgaaagcagcagacca

SEQ ID NO: 37651 - DNA, 21 bp, Artificial Sequence
  source: /note="Description of Artificial Sequence: Synthetic oligonucleotide"
agactcttcggagacgactac

SEQ ID NO: 37652 - DNA, 21 bp, Artificial Sequence
  source: /note="Description of Artificial Sequence: Synthetic oligonucleotide"
agactcggagacggagcagac

SEQ ID NO: 37653 - DNA, 21 bp, Artificial Sequence
  source: /note="Description of Artificial Sequence: Synthetic oligonucleotide"
agactcggagacgtctgggca

SEQ ID NO: 37654 - DNA, 21 bp, Artificial Sequence
  source: /note="Description of Artificial Sequence: Synthetic oligonucleotide"
agactcggaatggtcagcgaa

SEQ ID NO: 37655 - DNA, 21 bp, Artificial Sequence
  source: /note="Description of Artificial Sequence: Synthetic oligonucleotide"
agactcggaccaggataccca

SEQ ID NO: 37656 - DNA, 21 bp, Artificial Sequence
  source: /note="Description of Artificial Sequence: Synthetic oligonucleotide"
agactcggaccagtcagcgga

SEQ ID NO: 37657 - DNA, 21 bp, Artificial Sequence
  source: /note="Description of Artificial Sequence: Synthetic oligonucleotide"
agactcggaagccaaacaagc

SEQ ID NO: 37658 - DNA, 21 bp, Artificial Sequence
  source: /note="Description of Artificial Sequence: Synthetic oligonucleotide"
agactcggaacacacagcgaa

SEQ ID NO: 37659 - DNA, 21 bp, Artificial Sequence
  source: /note="Description of Artificial Sequence: Synthetic oligonucleotide"
agactcggaacatgggcagaa

SEQ ID NO: 37660 - DNA, 21 bp, Artificial Sequence
  source: /note="Description of Artificial Sequence: Synthetic oligonucleotide"
agactcggagtctgcccaagc

SEQ ID NO: 37661 - DNA, 21 bp, Artificial Sequence
  source: /note="Description of Artificial Sequence: Synthetic oligonucleotide"
agactccacatcggaagcgga

SEQ ID NO: 37662 - DNA, 21 bp, Artificial Sequence
  source: /note="Description of Artificial Sequence: Synthetic oligonucleotide"
agactccacatcaacagcgaa

SEQ ID NO: 37663 - DNA, 21 bp, Artificial Sequence
  source: /note="Description of Artificial Sequence: Synthetic oligonucleotide"
agactccacacagacctcgga

SEQ ID NO: 37664 - DNA, 21 bp, Artificial Sequence
  source: /note="Description of Artificial Sequence: Synthetic oligonucleotide"
agactcatccacagcggattc

SEQ ID NO: 37665 - DNA, 21 bp, Artificial Sequence
  source: /note="Description of Artificial Sequence: Synthetic oligonucleotide"
agactcatcaacaacagcgca

SEQ ID NO: 37666 - DNA, 21 bp, Artificial Sequence
  source: /note="Description of Artificial Sequence: Synthetic oligonucleotide"
agactcctcaaaacaccaagc

SEQ ID NO: 37667 - DNA, 21 bp, Artificial Sequence
  source: /note="Description of Artificial Sequence: Synthetic oligonucleotide"
agactcctcagcgcaacagga

SEQ ID NO: 37668 - DNA, 21 bp, Artificial Sequence
  source: /note="Description of Artificial Sequence: Synthetic oligonucleotide"
agactcatggacagagcagga

SEQ ID NO: 37669 - DNA, 21 bp, Artificial Sequence
  source: /note="Description of Artificial Sequence: Synthetic oligonucleotide"
agactcatgaacccaaaagga

SEQ ID NO: 37670 - DNA, 21 bp, Artificial Sequence
  source: /note="Description of Artificial Sequence: Synthetic oligonucleotide"
agactcaacgacctcacactc

SEQ ID NO: 37671 - DNA, 21 bp, Artificial Sequence
  source: /note="Description of Artificial Sequence: Synthetic oligonucleotide"
agactcaacctcagcacaaca

SEQ ID NO: 37672 - DNA, 21 bp, Artificial Sequence
  source: /note="Description of Artificial Sequence: Synthetic oligonucleotide"
agactcaacaacaacacactc

SEQ ID NO: 37673 - DNA, 21 bp, Artificial Sequence
  source: /note="Description of Artificial Sequence: Synthetic oligonucleotide"
agactcaaccaagtcccagca

SEQ ID NO: 37674 - DNA, 21 bp, Artificial Sequence
  source: /note="Description of Artificial Sequence: Synthetic oligonucleotide"
agactcaacacaagcatgatg

SEQ ID NO: 37675 - DNA, 21 bp, Artificial Sequence
  source: /note="Description of Artificial Sequence: Synthetic oligonucleotide"
agactcccagacccaagcagc

SEQ ID NO: 37676 - DNA, 21 bp, Artificial Sequence
  source: /note="Description of Artificial Sequence: Synthetic oligonucleotide"
agactcccaggaccagaaaga

SEQ ID NO: 37677 - DNA, 21 bp, Artificial Sequence
  source: /note="Description of Artificial Sequence: Synthetic oligonucleotide"
agactcccactcgaaaacctc

SEQ ID NO: 37678 - DNA, 21 bp, Artificial Sequence
  source: /note="Description of Artificial Sequence: Synthetic oligonucleotide"
agactcccactcagcgcacac

SEQ ID NO: 37679 - DNA, 21 bp, Artificial Sequence
  source: /note="Description of Artificial Sequence: Synthetic oligonucleotide"
agactcccaccaagcggaatc

SEQ ID NO: 37680 - DNA, 21 bp, Artificial Sequence
  source: /note="Description of Artificial Sequence: Synthetic oligonucleotide"
agactcccaccaacagacgtc

SEQ ID NO: 37681 - DNA, 21 bp, Artificial Sequence
  source: /note="Description of Artificial Sequence: Synthetic oligonucleotide"
agactcccacaaagagacatc

SEQ ID NO: 37682 - DNA, 21 bp, Artificial Sequence
  source: /note="Description of Artificial Sequence: Synthetic oligonucleotide"
agactcccaagcgaaaaacaa

SEQ ID NO: 37683 - DNA, 21 bp, Artificial Sequence
  source: /note="Description of Artificial Sequence: Synthetic oligonucleotide"
agactcccaagcctcgtcgac

SEQ ID NO: 37684 - DNA, 21 bp, Artificial Sequence
  source: /note="Description of Artificial Sequence: Synthetic oligonucleotide"
agactcccaacaagactcgac

SEQ ID NO: 37685 - DNA, 21 bp, Artificial Sequence
  source: /note="Description of Artificial Sequence: Synthetic oligonucleotide"
agactcccaacaagccacttc

SEQ ID NO: 37686 - DNA, 21 bp, Artificial Sequence
  source: /note="Description of Artificial Sequence: Synthetic oligonucleotide"
agactcccaacagtcacagga

SEQ ID NO: 37687 - DNA, 21 bp, Artificial Sequence
  source: /note="Description of Artificial Sequence: Synthetic oligonucleotide"
agactcccagtccaaccaagc

SEQ ID NO: 37688 - DNA, 21 bp, Artificial Sequence
  source: /note="Description of Artificial Sequence: Synthetic oligonucleotide"
agactccaagacaacggaagc

SEQ ID NO: 37689 - DNA, 21 bp, Artificial Sequence
  source: /note="Description of Artificial Sequence: Synthetic oligonucleotide"
agactccaaggattcccaaac

SEQ ID NO: 37690 - DNA, 21 bp, Artificial Sequence
  source: /note="Description of Artificial Sequence: Synthetic oligonucleotide"
agactccaactccaagaccac

SEQ ID NO: 37691 - DNA, 21 bp, Artificial Sequence
  source: /note="Description of Artificial Sequence: Synthetic oligonucleotide"
agactccaaaacacaggaaca

SEQ ID NO: 37692 - DNA, 21 bp, Artificial Sequence
  source: /note="Description of Artificial Sequence: Synthetic oligonucleotide"
agactccaaccagcagaagaa

SEQ ID NO: 37693 - DNA, 21 bp, Artificial Sequence
  source: /note="Description of Artificial Sequence: Synthetic oligonucleotide"
agactccaacaagtcggagtc

SEQ ID NO: 37694 - DNA, 21 bp, Artificial Sequence
  source: /note="Description of Artificial Sequence: Synthetic oligonucleotide"
agactccaaagcagcatcgaa

SEQ ID NO: 37695 - DNA, 21 bp, Artificial Sequence
  source: /note="Description of Artificial Sequence: Synthetic oligonucleotide"
agactcagaccaggactcgac

SEQ ID NO: 37696 - DNA, 21 bp, Artificial Sequence
  source: /note="Description of Artificial Sequence: Synthetic oligonucleotide"
agactcagcgcagacacacac

SEQ ID NO: 37697 - DNA, 21 bp, Artificial Sequence
  source: /note="Description of Artificial Sequence: Synthetic oligonucleotide"
agactcagccacgcaggagtc

SEQ ID NO: 37698 - DNA, 21 bp, Artificial Sequence
  source: /note="Description of Artificial Sequence: Synthetic oligonucleotide"
agactcagcatcggaagcgtc

SEQ ID NO: 37699 - DNA, 21 bp, Artificial Sequence
  source: /note="Description of Artificial Sequence: Synthetic oligonucleotide"
agactcagcctcgacagattc

SEQ ID NO: 37700 - DNA, 21 bp, Artificial Sequence
  source: /note="Description of Artificial Sequence: Synthetic oligonucleotide"
agactcagcctcccaagcaca

SEQ ID NO: 37701 - DNA, 21 bp, Artificial Sequence
  source: /note="Description of Artificial Sequence: Synthetic oligonucleotide"
agactcagcaacagcgaacca

SEQ ID NO: 37702 - DNA, 21 bp, Artificial Sequence
  source: /note="Description of Artificial Sequence: Synthetic oligonucleotide"
agactcagcccaccaccaagc

SEQ ID NO: 37703 - DNA, 21 bp, Artificial Sequence
  source: /note="Description of Artificial Sequence: Synthetic oligonucleotide"
agactcagcccacaaccagca

SEQ ID NO: 37704 - DNA, 21 bp, Artificial Sequence
  source: /note="Description of Artificial Sequence: Synthetic oligonucleotide"
agactcagccaaagcaacaac

SEQ ID NO: 37705 - DNA, 21 bp, Artificial Sequence
  source: /note="Description of Artificial Sequence: Synthetic oligonucleotide"
agactcagcagcggaccaatc

SEQ ID NO: 37706 - DNA, 21 bp, Artificial Sequence
  source: /note="Description of Artificial Sequence: Synthetic oligonucleotide"
agactcagcagcaacctcgaa

SEQ ID NO: 37707 - DNA, 21 bp, Artificial Sequence
  source: /note="Description of Artificial Sequence: Synthetic oligonucleotide"
agactcacagcaacaagcaac

SEQ ID NO: 37708 - DNA, 21 bp, Artificial Sequence
  source: /note="Description of Artificial Sequence: Synthetic oligonucleotide"
agactcacagacagaagcaca

SEQ ID NO: 37709 - DNA, 21 bp, Artificial Sequence
  source: /note="Description of Artificial Sequence: Synthetic oligonucleotide"
agactcacagaaccacacaga

SEQ ID NO: 37710 - DNA, 21 bp, Artificial Sequence
  source: /note="Description of Artificial Sequence: Synthetic oligonucleotide"
agactcacacacgaaagccca

SEQ ID NO: 37711 - DNA, 21 bp, Artificial Sequence
  source: /note="Description of Artificial Sequence: Synthetic oligonucleotide"
agactcacacacacaggacac

SEQ ID NO: 37712 - DNA, 21 bp, Artificial Sequence
  source: /note="Description of Artificial Sequence: Synthetic oligonucleotide"
agactcacaatggtcagagac

SEQ ID NO: 37713 - DNA, 21 bp, Artificial Sequence
  source: /note="Description of Artificial Sequence: Synthetic oligonucleotide"
agactcacaccagaaggacaa

SEQ ID NO: 37714 - DNA, 21 bp, Artificial Sequence
  source: /note="Description of Artificial Sequence: Synthetic oligonucleotide"
agactcgtcgacaacctccca

SEQ ID NO: 37715 - DNA, 21 bp, Artificial Sequence
  source: /note="Description of Artificial Sequence: Synthetic oligonucleotide"
agactcgtcaaccaaatgagc

SEQ ID NO: 37716 - DNA, 21 bp, Artificial Sequence
  source: /note="Description of Artificial Sequence: Synthetic oligonucleotide"
agactcgtccaagcattcgca

SEQ ID NO: 37717 - DNA, 21 bp, Artificial Sequence
  source: /note="Description of Artificial Sequence: Synthetic oligonucleotide"
agactctacagcggaatcgaa

SEQ ID NO: 37718 - DNA, 21 bp, Artificial Sequence
  source: /note="Description of Artificial Sequence: Synthetic oligonucleotide"
agactctacagcaacagccca

SEQ ID NO: 37719 - DNA, 21 bp, Artificial Sequence
  source: /note="Description of Artificial Sequence: Synthetic oligonucleotide"
agaatggcaaaagaaacaagc

SEQ ID NO: 37720 - DNA, 21 bp, Artificial Sequence
  source: /note="Description of Artificial Sequence: Synthetic oligonucleotide"
agaatggaaccaccaatcagc

SEQ ID NO: 37721 - DNA, 21 bp, Artificial Sequence
  source: /note="Description of Artificial Sequence: Synthetic oligonucleotide"
agaatggaaccaagcgcagtc

SEQ ID NO: 37722 - DNA, 21 bp, Artificial Sequence
  source: /note="Description of Artificial Sequence: Synthetic oligonucleotide"
agaatgggagcagcagtctac

SEQ ID NO: 37723 - DNA, 21 bp, Artificial Sequence
  source: /note="Description of Artificial Sequence: Synthetic oligonucleotide"
agaatgggagtccacccaaca

SEQ ID NO: 37724 - DNA, 21 bp, Artificial Sequence
  source: /note="Description of Artificial Sequence: Synthetic oligonucleotide"
agaatgggatacgtcgaagca

SEQ ID NO: 37725 - DNA, 21 bp, Artificial Sequence
  source: /note="Description of Artificial Sequence: Synthetic oligonucleotide"
agaatgcacgtcacagaagca

SEQ ID NO: 37726 - DNA, 21 bp, Artificial Sequence
  source: /note="Description of Artificial Sequence: Synthetic oligonucleotide"
agaatgatccaaagcggacac

SEQ ID NO: 37727 - DNA, 21 bp, Artificial Sequence
  source: /note="Description of Artificial Sequence: Synthetic oligonucleotide"
agaatgctcgcaccaagcgga

SEQ ID NO: 37728 - DNA, 21 bp, Artificial Sequence
  source: /note="Description of Artificial Sequence: Synthetic oligonucleotide"
agaatgctcgaccaactcaac

SEQ ID NO: 37729 - DNA, 21 bp, Artificial Sequence
  source: /note="Description of Artificial Sequence: Synthetic oligonucleotide"
agaatgctcccagacgtctac

SEQ ID NO: 37730 - DNA, 21 bp, Artificial Sequence
  source: /note="Description of Artificial Sequence: Synthetic oligonucleotide"
agaatgatgccagacctccca

SEQ ID NO: 37731 - DNA, 21 bp, Artificial Sequence
  source: /note="Description of Artificial Sequence: Synthetic oligonucleotide"
agaatgaacgaagcactcgga

SEQ ID NO: 37732 - DNA, 21 bp, Artificial Sequence
  source: /note="Description of Artificial Sequence: Synthetic oligonucleotide"
agaatgaacatccaagtcgga

SEQ ID NO: 37733 - DNA, 21 bp, Artificial Sequence
  source: /note="Description of Artificial Sequence: Synthetic oligonucleotide"
agaatgaactacggaacagaa

SEQ ID NO: 37734 - DNA, 21 bp, Artificial Sequence
  source: /note="Description of Artificial Sequence: Synthetic oligonucleotide"
agaatgccagcaatggcagtc

SEQ ID NO: 37735 - DNA, 21 bp, Artificial Sequence
  source: /note="Description of Artificial Sequence: Synthetic oligonucleotide"
agaatgccagcaagcaacgca

SEQ ID NO: 37736 - DNA, 21 bp, Artificial Sequence
  source: /note="Description of Artificial Sequence: Synthetic oligonucleotide"
agaatgccaagagaacaaagc

SEQ ID NO: 37737 - DNA, 21 bp, Artificial Sequence
  source: /note="Description of Artificial Sequence: Synthetic oligonucleotide"
agaatgcaaagcgcatacgtc

SEQ ID NO: 37738 - DNA, 21 bp, Artificial Sequence
  source: /note="Description of Artificial Sequence: Synthetic oligonucleotide"
agaatgcaaagccaaggattc

SEQ ID NO: 37739 - DNA, 21 bp, Artificial Sequence
  source: /note="Description of Artificial Sequence: Synthetic oligonucleotide"
agaatgagcgacagcttcgtc

SEQ ID NO: 37740 - DNA, 21 bp, Artificial Sequence
  source: /note="Description of Artificial Sequence: Synthetic oligonucleotide"
agaatgagcgaagtcacaatc

SEQ ID NO: 37741 - DNA, 21 bp, Artificial Sequence
  source: /note="Description of Artificial Sequence: Synthetic oligonucleotide"
agaatgagcatcccaaacgac

SEQ ID NO: 37742 - DNA, 21 bp, Artificial Sequence
  source: /note="Description of Artificial Sequence: Synthetic oligonucleotide"
agaatgagcctcgcaagcgaa

SEQ ID NO: 37743 - DNA, 21 bp, Artificial Sequence
  source: /note="Description of Artificial Sequence: Synthetic oligonucleotide"
agaatgagcaacagcccacaa

SEQ ID NO: 37744 - DNA, 21 bp, Artificial Sequence
  source: /note="Description of Artificial Sequence: Synthetic oligonucleotide"
agaatgagcagcgacctccca

SEQ ID NO: 37745 - DNA, 21 bp, Artificial Sequence
  source: /note="Description of Artificial Sequence: Synthetic oligonucleotide"
agaatgacagcagcaatctgc

SEQ ID NO: 37746 - DNA, 21 bp, Artificial Sequence
  source: /note="Description of Artificial Sequence: Synthetic oligonucleotide"
agaatgacacacacagcacca

SEQ ID NO: 37747 - DNA, 21 bp, Artificial Sequence
  source: /note="Description of Artificial Sequence: Synthetic oligonucleotide"
agaatgacaatcggaacaaca

SEQ ID NO: 37748 - DNA, 21 bp, Artificial Sequence
  source: /note="Description of Artificial Sequence: Synthetic oligonucleotide"
agaatggtcggaggaggagac

SEQ ID NO: 37749 - DNA, 21 bp, Artificial Sequence
  source: /note="Description of Artificial Sequence: Synthetic oligonucleotide"
agaatggtcaacctcggacac

SEQ ID NO: 37750 - DNA, 21 bp, Artificial Sequence
  source: /note="Description of Artificial Sequence: Synthetic oligonucleotide"
agaatggtcagcagcagcgca

SEQ ID NO: 37751 - DNA, 21 bp, Artificial Sequence
  source: /note="Description of Artificial Sequence: Synthetic oligonucleotide"
agaatgtacggaagcagcagc

SEQ ID NO: 37752 - DNA, 21 bp, Artificial Sequence
  source: /note="Description of Artificial Sequence: Synthetic oligonucleotide"
agaaacgcagcagtcgaccca

SEQ ID NO: 37753 - DNA, 21 bp, Artificial Sequence
  source: /note="Description of Artificial Sequence: Synthetic oligonucleotide"
agaaacgcaggagaaacacac

SEQ ID NO: 37754 - DNA, 21 bp, Artificial Sequence
  source: /note="Description of Artificial Sequence: Synthetic oligonucleotide"
agaaacgcaggaacagacaga

SEQ ID NO: 37755 - DNA, 21 bp, Artificial Sequence
  source: /note="Description of Artificial Sequence: Synthetic oligonucleotide"
agaaacgcaaacatgccaaca

SEQ ID NO: 37756 - DNA, 21 bp, Artificial Sequence
  source: /note="Description of Artificial Sequence: Synthetic oligonucleotide"
agaaacgcaccaagcgcagac

SEQ ID NO: 37757 - DNA, 21 bp, Artificial Sequence
  source: /note="Description of Artificial Sequence: Synthetic oligonucleotide"
agaaacgcaacagcaatggtc

SEQ ID NO: 37758 - DNA, 21 bp, Artificial Sequence
  source: /note="Description of Artificial Sequence: Synthetic oligonucleotide"
agaaacgacctcacaggagtc

SEQ ID NO: 37759 - DNA, 21 bp, Artificial Sequence
  source: /note="Description of Artificial Sequence: Synthetic oligonucleotide"
agaaacgacatggtccaaagc

SEQ ID NO: 37760 - DNA, 21 bp, Artificial Sequence
  source: /note="Description of Artificial Sequence: Synthetic oligonucleotide"
agaaacgacaacagagtcaca

SEQ ID NO: 37761 - DNA, 21 bp, Artificial Sequence
  source: /note="Description of Artificial Sequence: Synthetic oligonucleotide"
agaaacgacagaagcttcgca

SEQ ID NO: 37762 - DNA, 21 bp, Artificial Sequence
  source: /note="Description of Artificial Sequence: Synthetic oligonucleotide"
agaaacgacacaagcgacctc

SEQ ID NO: 37763 - DNA, 21 bp, Artificial Sequence
  source: /note="Description of Artificial Sequence: Synthetic oligonucleotide"
agaaacgacgtcagcgacatc

SEQ ID NO: 37764 - DNA, 21 bp, Artificial Sequence
  source: /note="Description of Artificial Sequence: Synthetic oligonucleotide"
agaaacgaacaccacctccca

SEQ ID NO: 37765 - DNA, 21 bp, Artificial Sequence
  source: /note="Description of Artificial Sequence: Synthetic oligonucleotide"
agaaacgaaccaaacggagga

SEQ ID NO: 37766 - DNA, 21 bp, Artificial Sequence
  source: /note="Description of Artificial Sequence: Synthetic oligonucleotide"
agaaacttcgcagacagcatg

SEQ ID NO: 37767 - DNA, 21 bp, Artificial Sequence
  source: /note="Description of Artificial Sequence: Synthetic oligonucleotide"
agaaacttcacaggaccagaa

SEQ ID NO: 37768 - DNA, 21 bp, Artificial Sequence
  source: /note="Description of Artificial Sequence: Synthetic oligonucleotide"
agaaacggagcaatccaagca

SEQ ID NO: 37769 - DNA, 21 bp, Artificial Sequence
  source: /note="Description of Artificial Sequence: Synthetic oligonucleotide"
agaaacggaagagacgcagga

SEQ ID NO: 37770 - DNA, 21 bp, Artificial Sequence
  source: /note="Description of Artificial Sequence: Synthetic oligonucleotide"
agaaacggagtcacagcagca

SEQ ID NO: 37771 - DNA, 21 bp, Artificial Sequence
  source: /note="Description of Artificial Sequence: Synthetic oligonucleotide"
agaaaccacggattcgcagaa

SEQ ID NO: 37772 - DNA, 21 bp, Artificial Sequence
  source: /note="Description of Artificial Sequence: Synthetic oligonucleotide"
agaaacatcgacgacgcaaac

SEQ ID NO: 37773 - DNA, 21 bp, Artificial Sequence
  source: /note="Description of Artificial Sequence: Synthetic oligonucleotide"
agaaacaaagaaaacgtcgga

SEQ ID NO: 37774 - DNA, 21 bp, Artificial Sequence
  source: /note="Description of Artificial Sequence: Synthetic oligonucleotide"
agaaacctcccaccaagagac

SEQ ID NO: 37775 - DNA, 21 bp, Artificial Sequence
  source: /note="Description of Artificial Sequence: Synthetic oligonucleotide"
agaaacctcacaatcccagaa

SEQ ID NO: 37776 - DNA, 21 bp, Artificial Sequence
  source: /note="Description of Artificial Sequence: Synthetic oligonucleotide"
agaaacatggcactcacaagc

SEQ ID NO: 37777 - DNA, 21 bp, Artificial Sequence
  source: /note="Description of Artificial Sequence: Synthetic oligonucleotide"
agaaacaacgcactcccagac

SEQ ID NO: 37778 - DNA, 21 bp, Artificial Sequence
  source: /note="Description of Artificial Sequence: Synthetic oligonucleotide"
agaaacaacagccacggattc

SEQ ID NO: 37779 - DNA, 21 bp, Artificial Sequence
  source: /note="Description of Artificial Sequence: Synthetic oligonucleotide"
agaaacccagacatgcaccac

SEQ ID NO: 37780 - DNA, 21 bp, Artificial Sequence
  source: /note="Description of Artificial Sequence: Synthetic oligonucleotide"
agaaacccactcagcgcacaa

SEQ ID NO: 37781 - DNA, 21 bp, Artificial Sequence
  source: /note="Description of Artificial Sequence: Synthetic oligonucleotide"
agaaaccaaggactcctcgca

SEQ ID NO: 37782 - DNA, 21 bp, Artificial Sequence
  source: /note="Description of Artificial Sequence: Synthetic oligonucleotide"
agaaaccaaacaagcacaagc

SEQ ID NO: 37783 - DNA, 21 bp, Artificial Sequence
  source: /note="Description of Artificial Sequence: Synthetic oligonucleotide"
agaaacagagacccacaattc

SEQ ID NO: 37784 - DNA, 21 bp, Artificial Sequence
  source: /note="Description of Artificial Sequence: Synthetic oligonucleotide"
agaaacagcgcagcactccaa

SEQ ID NO: 37785 - DNA, 21 bp, Artificial Sequence
  source: /note="Description of Artificial Sequence: Synthetic oligonucleotide"
agaaacagcgactacagcgtc

SEQ ID NO: 37786 - DNA, 21 bp, Artificial Sequence
  source: /note="Description of Artificial Sequence: Synthetic oligonucleotide"
agaaacagcctcggattcgga

SEQ ID NO: 37787 - DNA, 21 bp, Artificial Sequence
  source: /note="Description of Artificial Sequence: Synthetic oligonucleotide"
agaaacagccaagtcccaatc

SEQ ID NO: 37788 - DNA, 21 bp, Artificial Sequence
  source: /note="Description of Artificial Sequence: Synthetic oligonucleotide"
agaaacagcagcagcctcgga

SEQ ID NO: 37789 - DNA, 21 bp, Artificial Sequence
  source: /note="Description of Artificial Sequence: Synthetic oligonucleotide"
agaaacagcacaagcatgaca

SEQ ID NO: 37790 - DNA, 21 bp, Artificial Sequence
  source: /note="Description of Artificial Sequence: Synthetic oligonucleotide"
agaaacagcgtcacaacacca

SEQ ID NO: 37791 - DNA, 21 bp, Artificial Sequence
  source: /note="Description of Artificial Sequence: Synthetic oligonucleotide"
agaaacagctacccaagcgac

SEQ ID NO: 37792 - DNA, 21 bp, Artificial Sequence
  source: /note="Description of Artificial Sequence: Synthetic oligonucleotide"
agaaacacagacgtcgacagc

SEQ ID NO: 37793 - DNA, 21 bp, Artificial Sequence
  source: /note="Description of Artificial Sequence: Synthetic oligonucleotide"
agaaacacactcctcatggac

SEQ ID NO: 37794 - DNA, 21 bp, Artificial Sequence
  source: /note="Description of Artificial Sequence: Synthetic oligonucleotide"
agaaacacactcgtcatccca

SEQ ID NO: 37795 - DNA, 21 bp, Artificial Sequence
  source: /note="Description of Artificial Sequence: Synthetic oligonucleotide"
agaaacacaccaaacagagac

SEQ ID NO: 37796 - DNA, 21 bp, Artificial Sequence
  source: /note="Description of Artificial Sequence: Synthetic oligonucleotide"
agaaacacaagccaactcgac

SEQ ID NO: 37797 - DNA, 21 bp, Artificial Sequence
  source: /note="Description of Artificial Sequence: Synthetic oligonucleotide"
agaaacgtcgaaacagcagga

SEQ ID NO: 37798 - DNA, 21 bp, Artificial Sequence
  source: /note="Description of Artificial Sequence: Synthetic oligonucleotide"
agaaacgtcggacacggagac

SEQ ID NO: 37799 - DNA, 21 bp, Artificial Sequence
  source: /note="Description of Artificial Sequence: Synthetic oligonucleotide"
agaaacgtcggaccaccaaca

SEQ ID NO: 37800 - DNA, 21 bp, Artificial Sequence
  source: /note="Description of Artificial Sequence: Synthetic oligonucleotide"
agaaacgtcccagaacacaga

SEQ ID NO: 37801 - DNA, 21 bp, Artificial Sequence
  source: /note="Description of Artificial Sequence: Synthetic oligonucleotide"
agaaacgtccaattcagccca

SEQ ID NO: 37802 - DNA, 21 bp, Artificial Sequence
  source: /note="Description of Artificial Sequence: Synthetic oligonucleotide"
agaaacgtcagagacacacca

SEQ ID NO: 37803 - DNA, 21 bp, Artificial Sequence
  source: /note="Description of Artificial Sequence: Synthetic oligonucleotide"
agaaacgtcagcgacagcagc

SEQ ID NO: 37804 - DNA, 21 bp, Artificial Sequence
  source: /note="Description of Artificial Sequence: Synthetic oligonucleotide"
agaaactacgcaggaaaagac

SEQ ID NO: 37805 - DNA, 21 bp, Artificial Sequence
  source: /note="Description of Artificial Sequence: Synthetic oligonucleotide"
agaccagcagcagtcagcaac

SEQ ID NO: 37806 - DNA, 21 bp, Artificial Sequence
  source: /note="Description of Artificial Sequence: Synthetic oligonucleotide"
agaccagcagacaaatgcaca

SEQ ID NO: 37807 - DNA, 21 bp, Artificial Sequence
  source: /note="Description of Artificial Sequence: Synthetic oligonucleotide"
agaccagcaaaactcgaactc

SEQ ID NO: 37808 - DNA, 21 bp, Artificial Sequence
  source: /note="Description of Artificial Sequence: Synthetic oligonucleotide"
agaccagcaatgctcgcaaca

SEQ ID NO: 37809 - DNA, 21 bp, Artificial Sequence
  source: /note="Description of Artificial Sequence: Synthetic oligonucleotide"
agaccagcaagcggacacgtc

SEQ ID NO: 37810 - DNA, 21 bp, Artificial Sequence
  source: /note="Description of Artificial Sequence: Synthetic oligonucleotide"
agaccagcaacagtcggagca

SEQ ID NO: 37811 - DNA, 21 bp, Artificial Sequence
  source: /note="Description of Artificial Sequence: Synthetic oligonucleotide"
agaccagcagtcatgaaagga

SEQ ID NO: 37812 - DNA, 21 bp, Artificial Sequence
  source: /note="Description of Artificial Sequence: Synthetic oligonucleotide"
agaccagacgcaagcgaaagc

SEQ ID NO: 37813 - DNA, 21 bp, Artificial Sequence
  source: /note="Description of Artificial Sequence: Synthetic oligonucleotide"
agaccagacgacccagcaaac

SEQ ID NO: 37814 - DNA, 21 bp, Artificial Sequence
  source: /note="Description of Artificial Sequence: Synthetic oligonucleotide"
agaccagacggaatggcaagc

SEQ ID NO: 37815 - DNA, 21 bp, Artificial Sequence
  source: /note="Description of Artificial Sequence: Synthetic oligonucleotide"
agaccagaccacagcaacgtc

SEQ ID NO: 37816 - DNA, 21 bp, Artificial Sequence
  source: /note="Description of Artificial Sequence: Synthetic oligonucleotide"
agaccagacaacagcaaagca

SEQ ID NO: 37817 - DNA, 21 bp, Artificial Sequence
  source: /note="Description of Artificial Sequence: Synthetic oligonucleotide"
agaccagacagcctcaaactc

SEQ ID NO: 37818 - DNA, 21 bp, Artificial Sequence
  source: /note="Description of Artificial Sequence: Synthetic oligonucleotide"
agaccagacagcccattcaca

SEQ ID NO: 37819 - DNA, 21 bp, Artificial Sequence
  source: /note="Description of Artificial Sequence: Synthetic oligonucleotide"
agaccagacacaagagcagca

SEQ ID NO: 37820 - DNA, 21 bp, Artificial Sequence
  source: /note="Description of Artificial Sequence: Synthetic oligonucleotide"
agaccagaagaagcaacaagc

SEQ ID NO: 37821 - DNA, 21 bp, Artificial Sequence
  source: /note="Description of Artificial Sequence: Synthetic oligonucleotide"
agaccagaaggaagcatggga

SEQ ID NO: 37822 - DNA, 21 bp, Artificial Sequence
  source: /note="Description of Artificial Sequence: Synthetic oligonucleotide"
agaccagaactcggactcctc

SEQ ID NO: 37823 - DNA, 21 bp, Artificial Sequence
  source: /note="Description of Artificial Sequence: Synthetic oligonucleotide"
agaccagaactcaaacaaagc

SEQ ID NO: 37824 - DNA, 21 bp, Artificial Sequence
  source: /note="Description of Artificial Sequence: Synthetic oligonucleotide"
agaccagaactcagcagcaga

SEQ ID NO: 37825 - DNA, 21 bp, Artificial Sequence
  source: /note="Description of Artificial Sequence: Synthetic oligonucleotide"
agaccagaaagcgtctacgga

SEQ ID NO: 37826 - DNA, 21 bp, Artificial Sequence
  source: /note="Description of Artificial Sequence: Synthetic oligonucleotide"
agaccattcgcaccacaagaa

SEQ ID NO: 37827 - DNA, 21 bp, Artificial Sequence
  source: /note="Description of Artificial Sequence: Synthetic oligonucleotide"
agaccattcagcccaacacca

SEQ ID NO: 37828 - DNA, 21 bp, Artificial Sequence
  source: /note="Description of Artificial Sequence: Synthetic oligonucleotide"
agaccaggagcagacgcaaga

SEQ ID NO: 37829 - DNA, 21 bp, Artificial Sequence
  source: /note="Description of Artificial Sequence: Synthetic oligonucleotide"
agaccaggaggaggaacagaa

SEQ ID NO: 37830 - DNA, 21 bp, Artificial Sequence
  source: /note="Description of Artificial Sequence: Synthetic oligonucleotide"
agaccaggactcagcacactc

SEQ ID NO: 37831 - DNA, 21 bp, Artificial Sequence
  source: /note="Description of Artificial Sequence: Synthetic oligonucleotide"
agaccaggaaacacactccca

SEQ ID NO: 37832 - DNA, 21 bp, Artificial Sequence
  source: /note="Description of Artificial Sequence: Synthetic oligonucleotide"
agaccaggaagagaaccactc

SEQ ID NO: 37833 - DNA, 21 bp, Artificial Sequence
  source: /note="Description of Artificial Sequence: Synthetic oligonucleotide"
agaccaggaagcagcacagaa

SEQ ID NO: 37834 - DNA, 21 bp, Artificial Sequence
  source: /note="Description of Artificial Sequence: Synthetic oligonucleotide"
agaccaggaacaagcacagtc

SEQ ID NO: 37835 - DNA, 21 bp, Artificial Sequence
  source: /note="Description of Artificial Sequence: Synthetic oligonucleotide"
agaccacacagcgacaaattc

SEQ ID NO: 37836 - DNA, 21 bp, Artificial Sequence
  source: /note="Description of Artificial Sequence: Synthetic oligonucleotide"
agaccaatcgcaagcacaaac

SEQ ID NO: 37837 - DNA, 21 bp, Artificial Sequence
  source: /note="Description of Artificial Sequence: Synthetic oligonucleotide"
agaccaaaagaaagcagcgtc

SEQ ID NO: 37838 - DNA, 21 bp, Artificial Sequence
  source: /note="Description of Artificial Sequence: Synthetic oligonucleotide"
agaccactcgacgcaccagac

SEQ ID NO: 37839 - DNA, 21 bp, Artificial Sequence
  source: /note="Description of Artificial Sequence: Synthetic oligonucleotide"
agaccactcgaccaagaaagc

SEQ ID NO: 37840 - DNA, 21 bp, Artificial Sequence
  source: /note="Description of Artificial Sequence: Synthetic oligonucleotide"
agaccactcgaaagcagagac

SEQ ID NO: 37841 - DNA, 21 bp, Artificial Sequence
  source: /note="Description of Artificial Sequence: Synthetic oligonucleotide"
agaccactcggaccacacatc

SEQ ID NO: 37842 - DNA, 21 bp, Artificial Sequence
  source: /note="Description of Artificial Sequence: Synthetic oligonucleotide"
agaccactcggaccaaacgac

SEQ ID NO: 37843 - DNA, 21 bp, Artificial Sequence
  source: /note="Description of Artificial Sequence: Synthetic oligonucleotide"
agaccactcggaagcgacaca

SEQ ID NO: 37844 - DNA, 21 bp, Artificial Sequence
  source: /note="Description of Artificial Sequence: Synthetic oligonucleotide"
agaccactcatcccaaacaac

SEQ ID NO: 37845 - DNA, 21 bp, Artificial Sequence
  source: /note="Description of Artificial Sequence: Synthetic oligonucleotide"
agaccactcaaacacgaccca

SEQ ID NO: 37846 - DNA, 21 bp, Artificial Sequence
  source: /note="Description of Artificial Sequence: Synthetic oligonucleotide"
agaccactcacagaatacgtc

SEQ ID NO: 37847 - DNA, 21 bp, Artificial Sequence
  source: /note="Description of Artificial Sequence: Synthetic oligonucleotide"
agaccactcgtcatgggagtc

SEQ ID NO: 37848 - DNA, 21 bp, Artificial Sequence
  source: /note="Description of Artificial Sequence: Synthetic oligonucleotide"
agaccaatggcaacactcagc

SEQ ID NO: 37849 - DNA, 21 bp, Artificial Sequence
  source: /note="Description of Artificial Sequence: Synthetic oligonucleotide"
agaccaatgatcacaagcgca

SEQ ID NO: 37850 - DNA, 21 bp, Artificial Sequence
  source: /note="Description of Artificial Sequence: Synthetic oligonucleotide"
agaccaatgaacctcaaagaa

SEQ ID NO: 37851 - DNA, 21 bp, Artificial Sequence
  source: /note="Description of Artificial Sequence: Synthetic oligonucleotide"
agaccaatgccaaacagccca

SEQ ID NO: 37852 - DNA, 21 bp, Artificial Sequence
  source: /note="Description of Artificial Sequence: Synthetic oligonucleotide"
agaccaatgagcctcgaaagc

SEQ ID NO: 37853 - DNA, 21 bp, Artificial Sequence
  source: /note="Description of Artificial Sequence: Synthetic oligonucleotide"
agaccaatgacaccacaactc

SEQ ID NO: 37854 - DNA, 21 bp, Artificial Sequence
  source: /note="Description of Artificial Sequence: Synthetic oligonucleotide"
agaccaaacgcagtcacagtc

SEQ ID NO: 37855 - DNA, 21 bp, Artificial Sequence
  source: /note="Description of Artificial Sequence: Synthetic oligonucleotide"
agaccaccagaaatccacttc

SEQ ID NO: 37856 - DNA, 21 bp, Artificial Sequence
  source: /note="Description of Artificial Sequence: Synthetic oligonucleotide"
agaccaccaggaccaatgagc

SEQ ID NO: 37857 - DNA, 21 bp, Artificial Sequence
  source: /note="Description of Artificial Sequence: Synthetic oligonucleotide"
agaccaccactcggagaagga

SEQ ID NO: 37858 - DNA, 21 bp, Artificial Sequence
  source: /note="Description of Artificial Sequence: Synthetic oligonucleotide"
agaccaccaaacgcaacacca

SEQ ID NO: 37859 - DNA, 21 bp, Artificial Sequence
  source: /note="Description of Artificial Sequence: Synthetic oligonucleotide"
agaccaccaaacggagacatg

SEQ ID NO: 37860 - DNA, 21 bp, Artificial Sequence
  source: /note="Description of Artificial Sequence: Synthetic oligonucleotide"
agaccaccaagcacagtcaac

SEQ ID NO: 37861 - DNA, 21 bp, Artificial Sequence
  source: /note="Description of Artificial Sequence: Synthetic oligonucleotide"
agaccaccaagcgtccaacca

SEQ ID NO: 37862 - DNA, 21 bp, Artificial Sequence
  source: /note="Description of Artificial Sequence: Synthetic oligonucleotide"
agaccaccagtccaaacagga

SEQ ID NO: 37863 - DNA, 21 bp, Artificial Sequence
  source: /note="Description of Artificial Sequence: Synthetic oligonucleotide"
agaccacaacacatcatgcca

SEQ ID NO: 37864 - DNA, 21 bp, Artificial Sequence
  source: /note="Description of Artificial Sequence: Synthetic oligonucleotide"
agaccacaaaaagcaagcgaa

SEQ ID NO: 37865 - DNA, 21 bp, Artificial Sequence
  source: /note="Description of Artificial Sequence: Synthetic oligonucleotide"
agaccacaaccaacaccatgc

SEQ ID NO: 37866 - DNA, 21 bp, Artificial Sequence
  source: /note="Description of Artificial Sequence: Synthetic oligonucleotide"
agaccaagagaaatcagccca

SEQ ID NO: 37867 - DNA, 21 bp, Artificial Sequence
  source: /note="Description of Artificial Sequence: Synthetic oligonucleotide"
agaccaagattcgcaagcgac

SEQ ID NO: 37868 - DNA, 21 bp, Artificial Sequence
  source: /note="Description of Artificial Sequence: Synthetic oligonucleotide"
agaccaagcgcagcaacacca

SEQ ID NO: 37869 - DNA, 21 bp, Artificial Sequence
  source: /note="Description of Artificial Sequence: Synthetic oligonucleotide"
agaccaagcgacctcaaaaac

SEQ ID NO: 37870 - DNA, 21 bp, Artificial Sequence
  source: /note="Description of Artificial Sequence: Synthetic oligonucleotide"
agaccaagcggaatggcacac

SEQ ID NO: 37871 - DNA, 21 bp, Artificial Sequence
  source: /note="Description of Artificial Sequence: Synthetic oligonucleotide"
agaccaagcctcgcagtcgga

SEQ ID NO: 37872 - DNA, 21 bp, Artificial Sequence
  source: /note="Description of Artificial Sequence: Synthetic oligonucleotide"
agaccaagcctcccagacttc

SEQ ID NO: 37873 - DNA, 21 bp, Artificial Sequence
  source: /note="Description of Artificial Sequence: Synthetic oligonucleotide"
agaccaagcctcagcggaaca

SEQ ID NO: 37874 - DNA, 21 bp, Artificial Sequence
  source: /note="Description of Artificial Sequence: Synthetic oligonucleotide"
agaccaagcctcagcccaaca

SEQ ID NO: 37875 - DNA, 21 bp, Artificial Sequence
  source: /note="Description of Artificial Sequence: Synthetic oligonucleotide"
agaccaagcaacgcaatggca

SEQ ID NO: 37876 - DNA, 21 bp, Artificial Sequence
  source: /note="Description of Artificial Sequence: Synthetic oligonucleotide"
agaccaagcaaccaaagcagc

SEQ ID NO: 37877 - DNA, 21 bp, Artificial Sequence
  source: /note="Description of Artificial Sequence: Synthetic oligonucleotide"
agaccaagcacagacagctac

SEQ ID NO: 37878 - DNA, 21 bp, Artificial Sequence
  source: /note="Description of Artificial Sequence: Synthetic oligonucleotide"
agaccaagcacatacccaagc

SEQ ID NO: 37879 - DNA, 21 bp, Artificial Sequence
  source: /note="Description of Artificial Sequence: Synthetic oligonucleotide"
agaccaagcgtcaacgaacac

SEQ ID NO: 37880 - DNA, 21 bp, Artificial Sequence
  source: /note="Description of Artificial Sequence: Synthetic oligonucleotide"
agaccaacactcccaatggca

SEQ ID NO: 37881 - DNA, 21 bp, Artificial Sequence
  source: /note="Description of Artificial Sequence: Synthetic oligonucleotide"
agaccaacacaaatcctcgga

SEQ ID NO: 37882 - DNA, 21 bp, Artificial Sequence
  source: /note="Description of Artificial Sequence: Synthetic oligonucleotide"
agaccaacaagcccaccagca

SEQ ID NO: 37883 - DNA, 21 bp, Artificial Sequence
  source: /note="Description of Artificial Sequence: Synthetic oligonucleotide"
agaccaacaagcacaacaagc

SEQ ID NO: 37884 - DNA, 21 bp, Artificial Sequence
  source: /note="Description of Artificial Sequence: Synthetic oligonucleotide"
agaccaacaacaagcaacgga

SEQ ID NO: 37885 - DNA, 21 bp, Artificial Sequence
  source: /note="Description of Artificial Sequence: Synthetic oligonucleotide"
agaccaacaacaacacaagaa

SEQ ID NO: 37886 - DNA, 21 bp, Artificial Sequence
  source: /note="Description of Artificial Sequence: Synthetic oligonucleotide"
agaccaacaacaacaagcgtc

SEQ ID NO: 37887 - DNA, 21 bp, Artificial Sequence
  source: /note="Description of Artificial Sequence: Synthetic oligonucleotide"
agaccagtctgcgacggaaca

SEQ ID NO: 37888 - DNA, 21 bp, Artificial Sequence
  source: /note="Description of Artificial Sequence: Synthetic oligonucleotide"
agaccagtcgactgggacctc

SEQ ID NO: 37889 - DNA, 21 bp, Artificial Sequence
  source: /note="Description of Artificial Sequence: Synthetic oligonucleotide"
agaccagtcaaagaatacgtc

SEQ ID NO: 37890 - DNA, 21 bp, Artificial Sequence
  source: /note="Description of Artificial Sequence: Synthetic oligonucleotide"
agaccagtcctcagcacagga

SEQ ID NO: 37891 - DNA, 21 bp, Artificial Sequence
  source: /note="Description of Artificial Sequence: Synthetic oligonucleotide"
agaccagtcccagaccaaatc

SEQ ID NO: 37892 - DNA, 21 bp, Artificial Sequence
  source: /note="Description of Artificial Sequence: Synthetic oligonucleotide"
agaccatacccaccaccaatc

SEQ ID NO: 37893 - DNA, 21 bp, Artificial Sequence
  source: /note="Description of Artificial Sequence: Synthetic oligonucleotide"
agacaagcactcatcagcgga

SEQ ID NO: 37894 - DNA, 21 bp, Artificial Sequence
  source: /note="Description of Artificial Sequence: Synthetic oligonucleotide"
agacaagacgcagcaatcagc

SEQ ID NO: 37895 - DNA, 21 bp, Artificial Sequence
  source: /note="Description of Artificial Sequence: Synthetic oligonucleotide"
agacaagacgaccacaaaatc

SEQ ID NO: 37896 - DNA, 21 bp, Artificial Sequence
  source: /note="Description of Artificial Sequence: Synthetic oligonucleotide"
agacaattcacagaaaacgca

SEQ ID NO: 37897 - DNA, 21 bp, Artificial Sequence
  source: /note="Description of Artificial Sequence: Synthetic oligonucleotide"
agacaaggagtcacaccaaca

SEQ ID NO: 37898 - DNA, 21 bp, Artificial Sequence
  source: /note="Description of Artificial Sequence: Synthetic oligonucleotide"
agacaacaccaactcccacac

SEQ ID NO: 37899 - DNA, 21 bp, Artificial Sequence
  source: /note="Description of Artificial Sequence: Synthetic oligonucleotide"
agacaaatcccacacacagaa

SEQ ID NO: 37900 - DNA, 21 bp, Artificial Sequence
  source: /note="Description of Artificial Sequence: Synthetic oligonucleotide"
agacaaaaagaacacaacctc

SEQ ID NO: 37901 - DNA, 21 bp, Artificial Sequence
  source: /note="Description of Artificial Sequence: Synthetic oligonucleotide"
agacaactcgaagcagaccca

SEQ ID NO: 37902 - DNA, 21 bp, Artificial Sequence
  source: /note="Description of Artificial Sequence: Synthetic oligonucleotide"
agacaaaacgacgtctgcagc

SEQ ID NO: 37903 - DNA, 21 bp, Artificial Sequence
  source: /note="Description of Artificial Sequence: Synthetic oligonucleotide"
agacaaaaccacatgccagca

SEQ ID NO: 37904 - DNA, 21 bp, Artificial Sequence
  source: /note="Description of Artificial Sequence: Synthetic oligonucleotide"
agacaaaacagatgcatcgac

SEQ ID NO: 37905 - DNA, 21 bp, Artificial Sequence
  source: /note="Description of Artificial Sequence: Synthetic oligonucleotide"
agacaaccactctacacagac

SEQ ID NO: 37906 - DNA, 21 bp, Artificial Sequence
  source: /note="Description of Artificial Sequence: Synthetic oligonucleotide"
agacaaccaccaaaactcgca

SEQ ID NO: 37907 - DNA, 21 bp, Artificial Sequence
  source: /note="Description of Artificial Sequence: Synthetic oligonucleotide"
agacaacaagcacacctcgtc

SEQ ID NO: 37908 - DNA, 21 bp, Artificial Sequence
  source: /note="Description of Artificial Sequence: Synthetic oligonucleotide"
agacaaagcgacctctacagc

SEQ ID NO: 37909 - DNA, 21 bp, Artificial Sequence
  source: /note="Description of Artificial Sequence: Synthetic oligonucleotide"
agacaaagcaacttcgcaaca

SEQ ID NO: 37910 - DNA, 21 bp, Artificial Sequence
  source: /note="Description of Artificial Sequence: Synthetic oligonucleotide"
agacaaagcaacacactcaac

SEQ ID NO: 37911 - DNA, 21 bp, Artificial Sequence
  source: /note="Description of Artificial Sequence: Synthetic oligonucleotide"
agacaaagccaatgcccaatg

SEQ ID NO: 37912 - DNA, 21 bp, Artificial Sequence
  source: /note="Description of Artificial Sequence: Synthetic oligonucleotide"
agacaaagcagctacgacgtc

SEQ ID NO: 37913 - DNA, 21 bp, Artificial Sequence
  source: /note="Description of Artificial Sequence: Synthetic oligonucleotide"
agacaaagcacacaactcctc

SEQ ID NO: 37914 - DNA, 21 bp, Artificial Sequence
  source: /note="Description of Artificial Sequence: Synthetic oligonucleotide"
agacaaagcgtcccaacaagc

SEQ ID NO: 37915 - DNA, 21 bp, Artificial Sequence
  source: /note="Description of Artificial Sequence: Synthetic oligonucleotide"
agacaaagcgtcagcaacctc

SEQ ID NO: 37916 - DNA, 21 bp, Artificial Sequence
  source: /note="Description of Artificial Sequence: Synthetic oligonucleotide"
agacaaacacacacactccaa

SEQ ID NO: 37917 - DNA, 21 bp, Artificial Sequence
  source: /note="Description of Artificial Sequence: Synthetic oligonucleotide"
agacaaacacaacaaatgtac

SEQ ID NO: 37918 - DNA, 21 bp, Artificial Sequence
  source: /note="Description of Artificial Sequence: Synthetic oligonucleotide"
agacaagtcgaaacaatgagc

SEQ ID NO: 37919 - DNA, 21 bp, Artificial Sequence
  source: /note="Description of Artificial Sequence: Synthetic oligonucleotide"
agacaagtcggaatgctcagc

SEQ ID NO: 37920 - DNA, 21 bp, Artificial Sequence
  source: /note="Description of Artificial Sequence: Synthetic oligonucleotide"
agacaagtcccaagcgcagaa

SEQ ID NO: 37921 - DNA, 21 bp, Artificial Sequence
  source: /note="Description of Artificial Sequence: Synthetic oligonucleotide"
agaagagacgacggaagcagc

SEQ ID NO: 37922 - DNA, 21 bp, Artificial Sequence
  source: /note="Description of Artificial Sequence: Synthetic oligonucleotide"
agaagagacgaactcacactc

SEQ ID NO: 37923 - DNA, 21 bp, Artificial Sequence
  source: /note="Description of Artificial Sequence: Synthetic oligonucleotide"
agaagagacggaatgctcatg

SEQ ID NO: 37924 - DNA, 21 bp, Artificial Sequence
  source: /note="Description of Artificial Sequence: Synthetic oligonucleotide"
agaagagaccacgcaccaatc

SEQ ID NO: 37925 - DNA, 21 bp, Artificial Sequence
  source: /note="Description of Artificial Sequence: Synthetic oligonucleotide"
agaagagacccaagcacagtc

SEQ ID NO: 37926 - DNA, 21 bp, Artificial Sequence
  source: /note="Description of Artificial Sequence: Synthetic oligonucleotide"
agaagagaccaaccagtccca

SEQ ID NO: 37927 - DNA, 21 bp, Artificial Sequence
  source: /note="Description of Artificial Sequence: Synthetic oligonucleotide"
agaagagacgtcagcggacca

SEQ ID NO: 37928 - DNA, 21 bp, Artificial Sequence
  source: /note="Description of Artificial Sequence: Synthetic oligonucleotide"
agaagagaaagcggaatcgga

SEQ ID NO: 37929 - DNA, 21 bp, Artificial Sequence
  source: /note="Description of Artificial Sequence: Synthetic oligonucleotide"
agaagaggaacaagcgaacca

SEQ ID NO: 37930 - DNA, 21 bp, Artificial Sequence
  source: /note="Description of Artificial Sequence: Synthetic oligonucleotide"
agaagactcccaggagacgtc

SEQ ID NO: 37931 - DNA, 21 bp, Artificial Sequence
  source: /note="Description of Artificial Sequence: Synthetic oligonucleotide"
agaagaaacgacgcactccca

SEQ ID NO: 37932 - DNA, 21 bp, Artificial Sequence
  source: /note="Description of Artificial Sequence: Synthetic oligonucleotide"
agaagaccagaaatcgaaaga

SEQ ID NO: 37933 - DNA, 21 bp, Artificial Sequence
  source: /note="Description of Artificial Sequence: Synthetic oligonucleotide"
agaagaccaagcctcagcgac

SEQ ID NO: 37934 - DNA, 21 bp, Artificial Sequence
  source: /note="Description of Artificial Sequence: Synthetic oligonucleotide"
agaagaccaagcccagacgtc

SEQ ID NO: 37935 - DNA, 21 bp, Artificial Sequence
  source: /note="Description of Artificial Sequence: Synthetic oligonucleotide"
agaagaagcgacctctacgtc

SEQ ID NO: 37936 - DNA, 21 bp, Artificial Sequence
  source: /note="Description of Artificial Sequence: Synthetic oligonucleotide"
agaagaacagacacactctac

SEQ ID NO: 37937 - DNA, 21 bp, Artificial Sequence
  source: /note="Description of Artificial Sequence: Synthetic oligonucleotide"
agaagagtcggaacaggagac

SEQ ID NO: 37938 - DNA, 21 bp, Artificial Sequence
  source: /note="Description of Artificial Sequence: Synthetic oligonucleotide"
agaagcgcagcagcagtctac

SEQ ID NO: 37939 - DNA, 21 bp, Artificial Sequence
  source: /note="Description of Artificial Sequence: Synthetic oligonucleotide"
agaagcgcagcaatgagcgaa

SEQ ID NO: 37940 - DNA, 21 bp, Artificial Sequence
  source: /note="Description of Artificial Sequence: Synthetic oligonucleotide"
agaagcgcagcaacaagcaca

SEQ ID NO: 37941 - DNA, 21 bp, Artificial Sequence
  source: /note="Description of Artificial Sequence: Synthetic oligonucleotide"
agaagcgcagcagtcacatac

SEQ ID NO: 37942 - DNA, 21 bp, Artificial Sequence
  source: /note="Description of Artificial Sequence: Synthetic oligonucleotide"
agaagcgcaggaccaaacgaa

SEQ ID NO: 37943 - DNA, 21 bp, Artificial Sequence
  source: /note="Description of Artificial Sequence: Synthetic oligonucleotide"
agaagcgcactcaacacaagc

SEQ ID NO: 37944 - DNA, 21 bp, Artificial Sequence
  source: /note="Description of Artificial Sequence: Synthetic oligonucleotide"
agaagcgcactcccaaacctc

SEQ ID NO: 37945 - DNA, 21 bp, Artificial Sequence
  source: /note="Description of Artificial Sequence: Synthetic oligonucleotide"
agaagcgcaatggcaggacca

SEQ ID NO: 37946 - DNA, 21 bp, Artificial Sequence
  source: /note="Description of Artificial Sequence: Synthetic oligonucleotide"
agaagcgcaaaccaaagcgtc

SEQ ID NO: 37947 - DNA, 21 bp, Artificial Sequence
  source: /note="Description of Artificial Sequence: Synthetic oligonucleotide"
agaagcgcaccagcagtcatc

SEQ ID NO: 37948 - DNA, 21 bp, Artificial Sequence
  source: /note="Description of Artificial Sequence: Synthetic oligonucleotide"
agaagcgcaccagaactcaca

SEQ ID NO: 37949 - DNA, 21 bp, Artificial Sequence
  source: /note="Description of Artificial Sequence: Synthetic oligonucleotide"
agaagcgcacaactcacagca

SEQ ID NO: 37950 - DNA, 21 bp, Artificial Sequence
  source: /note="Description of Artificial Sequence: Synthetic oligonucleotide"
agaagcgcacaaaacagcctc

SEQ ID NO: 37951 - DNA, 21 bp, Artificial Sequence
  source: /note="Description of Artificial Sequence: Synthetic oligonucleotide"
agaagcgcaagcctccaaagc

SEQ ID NO: 37952 - DNA, 21 bp, Artificial Sequence
  source: /note="Description of Artificial Sequence: Synthetic oligonucleotide"
agaagcgcagtcccagacagc

SEQ ID NO: 37953 - DNA, 21 bp, Artificial Sequence
  source: /note="Description of Artificial Sequence: Synthetic oligonucleotide"
agaagcgacgaactcagaaca

SEQ ID NO: 37954 - DNA, 21 bp, Artificial Sequence
  source: /note="Description of Artificial Sequence: Synthetic oligonucleotide"
agaagcgacggaagaagcatc

SEQ ID NO: 37955 - DNA, 21 bp, Artificial Sequence
  source: /note="Description of Artificial Sequence: Synthetic oligonucleotide"
agaagcgacccagcaagaaca

SEQ ID NO: 37956 - DNA, 21 bp, Artificial Sequence
  source: /note="Description of Artificial Sequence: Synthetic oligonucleotide"
agaagcgacagcagaccactc

SEQ ID NO: 37957 - DNA, 21 bp, Artificial Sequence
  source: /note="Description of Artificial Sequence: Synthetic oligonucleotide"
agaagcgacagcgtcacacac

SEQ ID NO: 37958 - DNA, 21 bp, Artificial Sequence
  source: /note="Description of Artificial Sequence: Synthetic oligonucleotide"
agaagcgacgtcagactcgca

SEQ ID NO: 37959 - DNA, 21 bp, Artificial Sequence
  source: /note="Description of Artificial Sequence: Synthetic oligonucleotide"
agaagcgaagaaatcagagac

SEQ ID NO: 37960 - DNA, 21 bp, Artificial Sequence
  source: /note="Description of Artificial Sequence: Synthetic oligonucleotide"
agaagcgaaatcctcgtcaca

SEQ ID NO: 37961 - DNA, 21 bp, Artificial Sequence
  source: /note="Description of Artificial Sequence: Synthetic oligonucleotide"
agaagcgaaaaagtcgcacca

SEQ ID NO: 37962 - DNA, 21 bp, Artificial Sequence
  source: /note="Description of Artificial Sequence: Synthetic oligonucleotide"
agaagcgaaccagacgaatac

SEQ ID NO: 37963 - DNA, 21 bp, Artificial Sequence
  source: /note="Description of Artificial Sequence: Synthetic oligonucleotide"
agaagcgaatacgcaccacaa

SEQ ID NO: 37964 - DNA, 21 bp, Artificial Sequence
  source: /note="Description of Artificial Sequence: Synthetic oligonucleotide"
agaagcggacacagcggatac

SEQ ID NO: 37965 - DNA, 21 bp, Artificial Sequence
  source: /note="Description of Artificial Sequence: Synthetic oligonucleotide"
agaagcggactcgcaagcgga

SEQ ID NO: 37966 - DNA, 21 bp, Artificial Sequence
  source: /note="Description of Artificial Sequence: Synthetic oligonucleotide"
agaagcggactcgacaaaaca

SEQ ID NO: 37967 - DNA, 21 bp, Artificial Sequence
  source: /note="Description of Artificial Sequence: Synthetic oligonucleotide"
agaagcggactcaaagaactc

SEQ ID NO: 37968 - DNA, 21 bp, Artificial Sequence
  source: /note="Description of Artificial Sequence: Synthetic oligonucleotide"
agaagcggaatggtcagcgca

SEQ ID NO: 37969 - DNA, 21 bp, Artificial Sequence
  source: /note="Description of Artificial Sequence: Synthetic oligonucleotide"
agaagcggacaagacgcactc

SEQ ID NO: 37970 - DNA, 21 bp, Artificial Sequence
  source: /note="Description of Artificial Sequence: Synthetic oligonucleotide"
agaagcggaagcggactcgaa

SEQ ID NO: 37971 - DNA, 21 bp, Artificial Sequence
  source: /note="Description of Artificial Sequence: Synthetic oligonucleotide"
agaagccacaacgaagaagaa

SEQ ID NO: 37972 - DNA, 21 bp, Artificial Sequence
  source: /note="Description of Artificial Sequence: Synthetic oligonucleotide"
agaagccacagcacagacagc

SEQ ID NO: 37973 - DNA, 21 bp, Artificial Sequence
  source: /note="Description of Artificial Sequence: Synthetic oligonucleotide"
agaagcatcgcagcagacgca

SEQ ID NO: 37974 - DNA, 21 bp, Artificial Sequence
  source: /note="Description of Artificial Sequence: Synthetic oligonucleotide"
agaagcatcgcatggagcgaa

SEQ ID NO: 37975 - DNA, 21 bp, Artificial Sequence
  source: /note="Description of Artificial Sequence: Synthetic oligonucleotide"
agaagcatcgaaaacgcagac

SEQ ID NO: 37976 - DNA, 21 bp, Artificial Sequence
  source: /note="Description of Artificial Sequence: Synthetic oligonucleotide"
agaagcatcccagacccaaca

SEQ ID NO: 37977 - DNA, 21 bp, Artificial Sequence
  source: /note="Description of Artificial Sequence: Synthetic oligonucleotide"
agaagcatccaaccaacaaac

SEQ ID NO: 37978 - DNA, 21 bp, Artificial Sequence
  source: /note="Description of Artificial Sequence: Synthetic oligonucleotide"
agaagcatccaaacaaaccca

SEQ ID NO: 37979 - DNA, 21 bp, Artificial Sequence
  source: /note="Description of Artificial Sequence: Synthetic oligonucleotide"
agaagcaaagaagcaacaagc

SEQ ID NO: 37980 - DNA, 21 bp, Artificial Sequence
  source: /note="Description of Artificial Sequence: Synthetic oligonucleotide"
agaagcaaacaagcaagcgaa

SEQ ID NO: 37981 - DNA, 21 bp, Artificial Sequence
  source: /note="Description of Artificial Sequence: Synthetic oligonucleotide"
agaagcaaaagcagcgaccca

SEQ ID NO: 37982 - DNA, 21 bp, Artificial Sequence
  source: /note="Description of Artificial Sequence: Synthetic oligonucleotide"
agaagcctcgacttcccagac

SEQ ID NO: 37983 - DNA, 21 bp, Artificial Sequence
  source: /note="Description of Artificial Sequence: Synthetic oligonucleotide"
agaagcctcgaacacagcaac

SEQ ID NO: 37984 - DNA, 21 bp, Artificial Sequence
  source: /note="Description of Artificial Sequence: Synthetic oligonucleotide"
agaagcctccacggaagccaa

SEQ ID NO: 37985 - DNA, 21 bp, Artificial Sequence
  source: /note="Description of Artificial Sequence: Synthetic oligonucleotide"
agaagcctcaacgcactccca

SEQ ID NO: 37986 - DNA, 21 bp, Artificial Sequence
  source: /note="Description of Artificial Sequence: Synthetic oligonucleotide"
agaagcctcaacagcacagca

SEQ ID NO: 37987 - DNA, 21 bp, Artificial Sequence
  source: /note="Description of Artificial Sequence: Synthetic oligonucleotide"
agaagcctcccagcagaaaca

SEQ ID NO: 37988 - DNA, 21 bp, Artificial Sequence
  source: /note="Description of Artificial Sequence: Synthetic oligonucleotide"
agaagcctcccaagcccacac

SEQ ID NO: 37989 - DNA, 21 bp, Artificial Sequence
  source: /note="Description of Artificial Sequence: Synthetic oligonucleotide"
agaagcctccaactcagcgac

SEQ ID NO: 37990 - DNA, 21 bp, Artificial Sequence
  source: /note="Description of Artificial Sequence: Synthetic oligonucleotide"
agaagcctcagcttcgcagca

SEQ ID NO: 37991 - DNA, 21 bp, Artificial Sequence
  source: /note="Description of Artificial Sequence: Synthetic oligonucleotide"
agaagcctcagcctcctcgga

SEQ ID NO: 37992 - DNA, 21 bp, Artificial Sequence
  source: /note="Description of Artificial Sequence: Synthetic oligonucleotide"
agaagcctcagcctcccacca

SEQ ID NO: 37993 - DNA, 21 bp, Artificial Sequence
  source: /note="Description of Artificial Sequence: Synthetic oligonucleotide"
agaagcctcagcccaacaaga

SEQ ID NO: 37994 - DNA, 21 bp, Artificial Sequence
  source: /note="Description of Artificial Sequence: Synthetic oligonucleotide"
agaagcctcacagtcacagca

SEQ ID NO: 37995 - DNA, 21 bp, Artificial Sequence
  source: /note="Description of Artificial Sequence: Synthetic oligonucleotide"
agaagcatggcagaaagcgtc

SEQ ID NO: 37996 - DNA, 21 bp, Artificial Sequence
  source: /note="Description of Artificial Sequence: Synthetic oligonucleotide"
agaagcatgcacgcaggagca

SEQ ID NO: 37997 - DNA, 21 bp, Artificial Sequence
  source: /note="Description of Artificial Sequence: Synthetic oligonucleotide"
agaagcatgatgctcagccca

SEQ ID NO: 37998 - DNA, 21 bp, Artificial Sequence
  source: /note="Description of Artificial Sequence: Synthetic oligonucleotide"
agaagcatgccaagcggagca

SEQ ID NO: 37999 - DNA, 21 bp, Artificial Sequence
  source: /note="Description of Artificial Sequence: Synthetic oligonucleotide"
agaagcatgccaacaacaaca

SEQ ID NO: 38000 - DNA, 21 bp, Artificial Sequence
  source: /note="Description of Artificial Sequence: Synthetic oligonucleotide"
agaagcatgacaggagcactc

SEQ ID NO: 38001 - DNA, 21 bp, Artificial Sequence
  source: /note="Description of Artificial Sequence: Synthetic oligonucleotide"
agaagcaacaaagaaacaagc

SEQ ID NO: 38002 - DNA, 21 bp, Artificial Sequence
  source: /note="Description of Artificial Sequence: Synthetic oligonucleotide"
agaagcaacctcgaaggactc

SEQ ID NO: 38003 - DNA, 21 bp, Artificial Sequence
  source: /note="Description of Artificial Sequence: Synthetic oligonucleotide"
agaagcaacatgccaatggga

SEQ ID NO: 38004 - DNA, 21 bp, Artificial Sequence
  source: /note="Description of Artificial Sequence: Synthetic oligonucleotide"
agaagcaacccagcaccattc

SEQ ID NO: 38005 - DNA, 21 bp, Artificial Sequence
  source: /note="Description of Artificial Sequence: Synthetic oligonucleotide"
agaagcaacccagtcggaaca

SEQ ID NO: 38006 - DNA, 21 bp, Artificial Sequence
  source: /note="Description of Artificial Sequence: Synthetic oligonucleotide"
agaagcaacagcgacgcagtc

SEQ ID NO: 38007 - DNA, 21 bp, Artificial Sequence
  source: /note="Description of Artificial Sequence: Synthetic oligonucleotide"
agaagcaacgtcgaaagcaaa

SEQ ID NO: 38008 - DNA, 21 bp, Artificial Sequence
  source: /note="Description of Artificial Sequence: Synthetic oligonucleotide"
agaagcaacgtcctcgcacaa

SEQ ID NO: 38009 - DNA, 21 bp, Artificial Sequence
  source: /note="Description of Artificial Sequence: Synthetic oligonucleotide"
agaagcccagacacaacagga

SEQ ID NO: 38010 - DNA, 21 bp, Artificial Sequence
  source: /note="Description of Artificial Sequence: Synthetic oligonucleotide"
agaagcccagaaaaagcactc

SEQ ID NO: 38011 - DNA, 21 bp, Artificial Sequence
  source: /note="Description of Artificial Sequence: Synthetic oligonucleotide"
agaagcccattcggaagcgca

SEQ ID NO: 38012 - DNA, 21 bp, Artificial Sequence
  source: /note="Description of Artificial Sequence: Synthetic oligonucleotide"
agaagcccaggaaacgtcgga

SEQ ID NO: 38013 - DNA, 21 bp, Artificial Sequence
  source: /note="Description of Artificial Sequence: Synthetic oligonucleotide"
agaagcccaccacaagacatg

SEQ ID NO: 38014 - DNA, 21 bp, Artificial Sequence
  source: /note="Description of Artificial Sequence: Synthetic oligonucleotide"
agaagcccaccaacaatcgca

SEQ ID NO: 38015 - DNA, 21 bp, Artificial Sequence
  source: /note="Description of Artificial Sequence: Synthetic oligonucleotide"
agaagcccacaactctacgca

SEQ ID NO: 38016 - DNA, 21 bp, Artificial Sequence
  source: /note="Description of Artificial Sequence: Synthetic oligonucleotide"
agaagcccacaagtcatgctc

SEQ ID NO: 38017 - DNA, 21 bp, Artificial Sequence
  source: /note="Description of Artificial Sequence: Synthetic oligonucleotide"
agaagcccaagcggaacaaca

SEQ ID NO: 38018 - DNA, 21 bp, Artificial Sequence
  source: /note="Description of Artificial Sequence: Synthetic oligonucleotide"
agaagcccaagcacaagcaac

SEQ ID NO: 38019 - DNA, 21 bp, Artificial Sequence
  source: /note="Description of Artificial Sequence: Synthetic oligonucleotide"
agaagcccaagcgtcctccca

SEQ ID NO: 38020 - DNA, 21 bp, Artificial Sequence
  source: /note="Description of Artificial Sequence: Synthetic oligonucleotide"
agaagcccaacattcgcacca

SEQ ID NO: 38021 - DNA, 21 bp, Artificial Sequence
  source: /note="Description of Artificial Sequence: Synthetic oligonucleotide"
agaagcccaacaagcgtcgca

SEQ ID NO: 38022 - DNA, 21 bp, Artificial Sequence
  source: /note="Description of Artificial Sequence: Synthetic oligonucleotide"
agaagcccagtcaaaggactc

SEQ ID NO: 38023 - DNA, 21 bp, Artificial Sequence
  source: /note="Description of Artificial Sequence: Synthetic oligonucleotide"
agaagccaagcacaagtcatc

SEQ ID NO: 38024 - DNA, 21 bp, Artificial Sequence
  source: /note="Description of Artificial Sequence: Synthetic oligonucleotide"
agaagccaaatcagcgacagc

SEQ ID NO: 38025 - DNA, 21 bp, Artificial Sequence
  source: /note="Description of Artificial Sequence: Synthetic oligonucleotide"
agaagccaactcatgggagca

SEQ ID NO: 38026 - DNA, 21 bp, Artificial Sequence
  source: /note="Description of Artificial Sequence: Synthetic oligonucleotide"
agaagccaaaaccaaggactc

SEQ ID NO: 38027 - DNA, 21 bp, Artificial Sequence
  source: /note="Description of Artificial Sequence: Synthetic oligonucleotide"
agaagccaaccactcagcctc

SEQ ID NO: 38028 - DNA, 21 bp, Artificial Sequence
  source: /note="Description of Artificial Sequence: Synthetic oligonucleotide"
agaagccaaccaagcacagga

SEQ ID NO: 38029 - DNA, 21 bp, Artificial Sequence
  source: /note="Description of Artificial Sequence: Synthetic oligonucleotide"
agaagccaacaaccatacgaa

SEQ ID NO: 38030 - DNA, 21 bp, Artificial Sequence
  source: /note="Description of Artificial Sequence: Synthetic oligonucleotide"
agaagccaaagcgcaacactc

SEQ ID NO: 38031 - DNA, 21 bp, Artificial Sequence
  source: /note="Description of Artificial Sequence: Synthetic oligonucleotide"
agaagccaaacaaacatgtac

SEQ ID NO: 38032 - DNA, 21 bp, Artificial Sequence
  source: /note="Description of Artificial Sequence: Synthetic oligonucleotide"
agaagcagagacagcgaacac

SEQ ID NO: 38033 - DNA, 21 bp, Artificial Sequence
  source: /note="Description of Artificial Sequence: Synthetic oligonucleotide"
agaagcagcgcattcggacca

SEQ ID NO: 38034 - DNA, 21 bp, Artificial Sequence
  source: /note="Description of Artificial Sequence: Synthetic oligonucleotide"
agaagcagcgaatacggaagc

SEQ ID NO: 38035 - DNA, 21 bp, Artificial Sequence
  source: /note="Description of Artificial Sequence: Synthetic oligonucleotide"
agaagcagcttcaacaaagac

SEQ ID NO: 38036 - DNA, 21 bp, Artificial Sequence
  source: /note="Description of Artificial Sequence: Synthetic oligonucleotide"
agaagcagccacggaggagaa

SEQ ID NO: 38037 - DNA, 21 bp, Artificial Sequence
  source: /note="Description of Artificial Sequence: Synthetic oligonucleotide"
agaagcagcctcaacctccac

SEQ ID NO: 38038 - DNA, 21 bp, Artificial Sequence
  source: /note="Description of Artificial Sequence: Synthetic oligonucleotide"
agaagcagcaacctcaacgca

SEQ ID NO: 38039 - DNA, 21 bp, Artificial Sequence
  source: /note="Description of Artificial Sequence: Synthetic oligonucleotide"
agaagcagcccaaacttccaa

SEQ ID NO: 38040 - DNA, 21 bp, Artificial Sequence
  source: /note="Description of Artificial Sequence: Synthetic oligonucleotide"
agaagcagcccaaacagccca

SEQ ID NO: 38041 - DNA, 21 bp, Artificial Sequence
  source: /note="Description of Artificial Sequence: Synthetic oligonucleotide"
agaagcagcccaagcgacaaa

SEQ ID NO: 38042 - DNA, 21 bp, Artificial Sequence
  source: /note="Description of Artificial Sequence: Synthetic oligonucleotide"
agaagcagcccatacctcgaa

SEQ ID NO: 38043 - DNA, 21 bp, Artificial Sequence
  source: /note="Description of Artificial Sequence: Synthetic oligonucleotide"
agaagcagcagcgcagtcgtc

SEQ ID NO: 38044 - DNA, 21 bp, Artificial Sequence
  source: /note="Description of Artificial Sequence: Synthetic oligonucleotide"
agaagcagcagcctcacacca

SEQ ID NO: 38045 - DNA, 21 bp, Artificial Sequence
  source: /note="Description of Artificial Sequence: Synthetic oligonucleotide"
agaagcagcagcaacccactc

SEQ ID NO: 38046 - DNA, 21 bp, Artificial Sequence
  source: /note="Description of Artificial Sequence: Synthetic oligonucleotide"
agaagcagcagcccaacaaca

SEQ ID NO: 38047 - DNA, 21 bp, Artificial Sequence
  source: /note="Description of Artificial Sequence: Synthetic oligonucleotide"
agaagcagcagcacacaaagc

SEQ ID NO: 38048 - DNA, 21 bp, Artificial Sequence
  source: /note="Description of Artificial Sequence: Synthetic oligonucleotide"
agaagcagcacacacagcgga

SEQ ID NO: 38049 - DNA, 21 bp, Artificial Sequence
  source: /note="Description of Artificial Sequence: Synthetic oligonucleotide"
agaagcagcacacaaatccca

SEQ ID NO: 38050 - DNA, 21 bp, Artificial Sequence
  source: /note="Description of Artificial Sequence: Synthetic oligonucleotide"
agaagcagcacaacactccca

SEQ ID NO: 38051 - DNA, 21 bp, Artificial Sequence
  source: /note="Description of Artificial Sequence: Synthetic oligonucleotide"
agaagcagctacacagaacac

SEQ ID NO: 38052 - DNA, 21 bp, Artificial Sequence
  source: /note="Description of Artificial Sequence: Synthetic oligonucleotide"
agaagcacagcagacagagac

SEQ ID NO: 38053 - DNA, 21 bp, Artificial Sequence
  source: /note="Description of Artificial Sequence: Synthetic oligonucleotide"
agaagcacagcaatcgacttc

SEQ ID NO: 38054 - DNA, 21 bp, Artificial Sequence
  source: /note="Description of Artificial Sequence: Synthetic oligonucleotide"
agaagcacagcactcccagac

SEQ ID NO: 38055 - DNA, 21 bp, Artificial Sequence
  source: /note="Description of Artificial Sequence: Synthetic oligonucleotide"
agaagcacaggaccaagcgtc

SEQ ID NO: 38056 - DNA, 21 bp, Artificial Sequence
  source: /note="Description of Artificial Sequence: Synthetic oligonucleotide"
agaagcacactcaacagccca

SEQ ID NO: 38057 - DNA, 21 bp, Artificial Sequence
  source: /note="Description of Artificial Sequence: Synthetic oligonucleotide"
agaagcacaatgagcaacagc

SEQ ID NO: 38058 - DNA, 21 bp, Artificial Sequence
  source: /note="Description of Artificial Sequence: Synthetic oligonucleotide"
agaagcacaaacaacctcaca

SEQ ID NO: 38059 - DNA, 21 bp, Artificial Sequence
  source: /note="Description of Artificial Sequence: Synthetic oligonucleotide"
agaagcacaagcccactccca

SEQ ID NO: 38060 - DNA, 21 bp, Artificial Sequence
  source: /note="Description of Artificial Sequence: Synthetic oligonucleotide"
agaagcacaacaagccaccca

SEQ ID NO: 38061 - DNA, 21 bp, Artificial Sequence
  source: /note="Description of Artificial Sequence: Synthetic oligonucleotide"
agaagcgtcgcaacaggagtc

SEQ ID NO: 38062 - DNA, 21 bp, Artificial Sequence
  source: /note="Description of Artificial Sequence: Synthetic oligonucleotide"
agaagcgtcgaaccactcgca

SEQ ID NO: 38063 - DNA, 21 bp, Artificial Sequence
  source: /note="Description of Artificial Sequence: Synthetic oligonucleotide"
agaagcgtcaaattcccaatg

SEQ ID NO: 38064 - DNA, 21 bp, Artificial Sequence
  source: /note="Description of Artificial Sequence: Synthetic oligonucleotide"
agaagcgtcccagaaagcaga

SEQ ID NO: 38065 - DNA, 21 bp, Artificial Sequence
  source: /note="Description of Artificial Sequence: Synthetic oligonucleotide"
agaagcgtccaaacaccaagc

SEQ ID NO: 38066 - DNA, 21 bp, Artificial Sequence
  source: /note="Description of Artificial Sequence: Synthetic oligonucleotide"
agaagcgtcagacaaaacgac

SEQ ID NO: 38067 - DNA, 21 bp, Artificial Sequence
  source: /note="Description of Artificial Sequence: Synthetic oligonucleotide"
agaagcgtcacagcaaacaac

SEQ ID NO: 38068 - DNA, 21 bp, Artificial Sequence
  source: /note="Description of Artificial Sequence: Synthetic oligonucleotide"
agaagcgtcacaccaggaatc

SEQ ID NO: 38069 - DNA, 21 bp, Artificial Sequence
  source: /note="Description of Artificial Sequence: Synthetic oligonucleotide"
agaagcgtcgtcgcacaaaca

SEQ ID NO: 38070 - DNA, 21 bp, Artificial Sequence
  source: /note="Description of Artificial Sequence: Synthetic oligonucleotide"
agaagctacggactcccagaa

SEQ ID NO: 38071 - DNA, 21 bp, Artificial Sequence
  source: /note="Description of Artificial Sequence: Synthetic oligonucleotide"
agaagctacaacccagaaagc

SEQ ID NO: 38072 - DNA, 21 bp, Artificial Sequence
  source: /note="Description of Artificial Sequence: Synthetic oligonucleotide"
agaagctacagcccaccaaca

SEQ ID NO: 38073 - DNA, 21 bp, Artificial Sequence
  source: /note="Description of Artificial Sequence: Synthetic oligonucleotide"
agaacagcagcaacatgcgca

SEQ ID NO: 38074 - DNA, 21 bp, Artificial Sequence
  source: /note="Description of Artificial Sequence: Synthetic oligonucleotide"
agaacagcagacatgagcgga

SEQ ID NO: 38075 - DNA, 21 bp, Artificial Sequence
  source: /note="Description of Artificial Sequence: Synthetic oligonucleotide"
agaacagcaatcggaaacctc

SEQ ID NO: 38076 - DNA, 21 bp, Artificial Sequence
  source: /note="Description of Artificial Sequence: Synthetic oligonucleotide"
agaacagcaaacccaacacca

SEQ ID NO: 38077 - DNA, 21 bp, Artificial Sequence
  source: /note="Description of Artificial Sequence: Synthetic oligonucleotide"
agaacagcaagcctcgtccca

SEQ ID NO: 38078 - DNA, 21 bp, Artificial Sequence
  source: /note="Description of Artificial Sequence: Synthetic oligonucleotide"
agaacagcaagcgtcgcagca

SEQ ID NO: 38079 - DNA, 21 bp, Artificial Sequence
  source: /note="Description of Artificial Sequence: Synthetic oligonucleotide"
agaacagcagtcacagacaca

SEQ ID NO: 38080 - DNA, 21 bp, Artificial Sequence
  source: /note="Description of Artificial Sequence: Synthetic oligonucleotide"
agaacagacggagacgtcaaa

SEQ ID NO: 38081 - DNA, 21 bp, Artificial Sequence
  source: /note="Description of Artificial Sequence: Synthetic oligonucleotide"
agaacagaattcaacatgcca

SEQ ID NO: 38082 - DNA, 21 bp, Artificial Sequence
  source: /note="Description of Artificial Sequence: Synthetic oligonucleotide"
agaacagaaggatgcgcagca

SEQ ID NO: 38083 - DNA, 21 bp, Artificial Sequence
  source: /note="Description of Artificial Sequence: Synthetic oligonucleotide"
agaacagaaccaggaccaagc

SEQ ID NO: 38084 - DNA, 21 bp, Artificial Sequence
  source: /note="Description of Artificial Sequence: Synthetic oligonucleotide"
agaacagaaagcccaccacaa

SEQ ID NO: 38085 - DNA, 21 bp, Artificial Sequence
  source: /note="Description of Artificial Sequence: Synthetic oligonucleotide"
agaacagaaacaggaaaactc

SEQ ID NO: 38086 - DNA, 21 bp, Artificial Sequence
  source: /note="Description of Artificial Sequence: Synthetic oligonucleotide"
agaacattcagcggagcagac

SEQ ID NO: 38087 - DNA, 21 bp, Artificial Sequence
  source: /note="Description of Artificial Sequence: Synthetic oligonucleotide"
agaacaggagcactcagcgaa

SEQ ID NO: 38088 - DNA, 21 bp, Artificial Sequence
  source: /note="Description of Artificial Sequence: Synthetic oligonucleotide"
agaacaggagaagtcacattc

SEQ ID NO: 38089 - DNA, 21 bp, Artificial Sequence
  source: /note="Description of Artificial Sequence: Synthetic oligonucleotide"
agaacaggaaacgcagcaagc

SEQ ID NO: 38090 - DNA, 21 bp, Artificial Sequence
  source: /note="Description of Artificial Sequence: Synthetic oligonucleotide"
agaacaggaccaggaagcgaa

SEQ ID NO: 38091 - DNA, 21 bp, Artificial Sequence
  source: /note="Description of Artificial Sequence: Synthetic oligonucleotide"
agaacaggaccaacaccaagc

SEQ ID NO: 38092 - DNA, 21 bp, Artificial Sequence
  source: /note="Description of Artificial Sequence: Synthetic oligonucleotide"
agaacaggaagctacccacaa

SEQ ID NO: 38093 - DNA, 21 bp, Artificial Sequence
  source: /note="Description of Artificial Sequence: Synthetic oligonucleotide"
agaacaggagtctgcggaaac

SEQ ID NO: 38094 - DNA, 21 bp, Artificial Sequence
  source: /note="Description of Artificial Sequence: Synthetic oligonucleotide"
agaacacacagcccagcagga

SEQ ID NO: 38095 - DNA, 21 bp, Artificial Sequence
  source: /note="Description of Artificial Sequence: Synthetic oligonucleotide"
agaacactcggaccagtcgga

SEQ ID NO: 38096 - DNA, 21 bp, Artificial Sequence
  source: /note="Description of Artificial Sequence: Synthetic oligonucleotide"
agaacactcatgccacaccca

SEQ ID NO: 38097 - DNA, 21 bp, Artificial Sequence
  source: /note="Description of Artificial Sequence: Synthetic oligonucleotide"
agaacactcaacagcgtcgca

SEQ ID NO: 38098 - DNA, 21 bp, Artificial Sequence
  source: /note="Description of Artificial Sequence: Synthetic oligonucleotide"
agaacaatggacgcaccagtc

SEQ ID NO: 38099 - DNA, 21 bp, Artificial Sequence
  source: /note="Description of Artificial Sequence: Synthetic oligonucleotide"
agaacaaacggagacgtcaaa

SEQ ID NO: 38100 - DNA, 21 bp, Artificial Sequence
  source: /note="Description of Artificial Sequence: Synthetic oligonucleotide"
agaacaaacggactcagccca

SEQ ID NO: 38101 - DNA, 21 bp, Artificial Sequence
  source: /note="Description of Artificial Sequence: Synthetic oligonucleotide"
agaacaaacaacgacgtcaca

SEQ ID NO: 38102 - DNA, 21 bp, Artificial Sequence
  source: /note="Description of Artificial Sequence: Synthetic oligonucleotide"
agaacaaacagccaactcgac

SEQ ID NO: 38103 - DNA, 21 bp, Artificial Sequence
  source: /note="Description of Artificial Sequence: Synthetic oligonucleotide"
agaacaaacagcacaagcatg

SEQ ID NO: 38104 - DNA, 21 bp, Artificial Sequence
  source: /note="Description of Artificial Sequence: Synthetic oligonucleotide"
agaacaccagcactcagcaac

SEQ ID NO: 38105 - DNA, 21 bp, Artificial Sequence
  source: /note="Description of Artificial Sequence: Synthetic oligonucleotide"
agaacaccagacagcctcgga

SEQ ID NO: 38106 - DNA, 21 bp, Artificial Sequence
  source: /note="Description of Artificial Sequence: Synthetic oligonucleotide"
agaacaccagaagcaatcagc

SEQ ID NO: 38107 - DNA, 21 bp, Artificial Sequence
  source: /note="Description of Artificial Sequence: Synthetic oligonucleotide"
agaacaccacacagcagcttc

SEQ ID NO: 38108 - DNA, 21 bp, Artificial Sequence
  source: /note="Description of Artificial Sequence: Synthetic oligonucleotide"
agaacaccaaaactcccaatg

SEQ ID NO: 38109 - DNA, 21 bp, Artificial Sequence
  source: /note="Description of Artificial Sequence: Synthetic oligonucleotide"
agaacaccaatgctcgaacca

SEQ ID NO: 38110 - DNA, 21 bp, Artificial Sequence
  source: /note="Description of Artificial Sequence: Synthetic oligonucleotide"
agaacaccagtcagcggagaa

SEQ ID NO: 38111 - DNA, 21 bp, Artificial Sequence
  source: /note="Description of Artificial Sequence: Synthetic oligonucleotide"
agaacacaaatcggagtcaac

SEQ ID NO: 38112 - DNA, 21 bp, Artificial Sequence
  source: /note="Description of Artificial Sequence: Synthetic oligonucleotide"
agaacaagcgcagtcggactc

SEQ ID NO: 38113 - DNA, 21 bp, Artificial Sequence
  source: /note="Description of Artificial Sequence: Synthetic oligonucleotide"
agaacaagctgcagcccagga

SEQ ID NO: 38114 - DNA, 21 bp, Artificial Sequence
  source: /note="Description of Artificial Sequence: Synthetic oligonucleotide"
agaacaagcgacgcaagcttc

SEQ ID NO: 38115 - DNA, 21 bp, Artificial Sequence
  source: /note="Description of Artificial Sequence: Synthetic oligonucleotide"
agaacaagcgacctcagcgca

SEQ ID NO: 38116 - DNA, 21 bp, Artificial Sequence
  source: /note="Description of Artificial Sequence: Synthetic oligonucleotide"
agaacaagcggaccaacagac

SEQ ID NO: 38117 - DNA, 21 bp, Artificial Sequence
  source: /note="Description of Artificial Sequence: Synthetic oligonucleotide"
agaacaagcatgggacaagca

SEQ ID NO: 38118 - DNA, 21 bp, Artificial Sequence
  source: /note="Description of Artificial Sequence: Synthetic oligonucleotide"
agaacaagcatggtcagcaac

SEQ ID NO: 38119 - DNA, 21 bp, Artificial Sequence
  source: /note="Description of Artificial Sequence: Synthetic oligonucleotide"
agaacaagcccagaaagcaga

SEQ ID NO: 38120 - DNA, 21 bp, Artificial Sequence
  source: /note="Description of Artificial Sequence: Synthetic oligonucleotide"
agaacaagcccactcgcagtc

SEQ ID NO: 38121 - DNA, 21 bp, Artificial Sequence
  source: /note="Description of Artificial Sequence: Synthetic oligonucleotide"
agaacaagcccacaaagcagc

SEQ ID NO: 38122 - DNA, 21 bp, Artificial Sequence
  source: /note="Description of Artificial Sequence: Synthetic oligonucleotide"
agaacaagcccaagcttccac

SEQ ID NO: 38123 - DNA, 21 bp, Artificial Sequence
  source: /note="Description of Artificial Sequence: Synthetic oligonucleotide"
agaacaagccaaacagaacca

SEQ ID NO: 38124 - DNA, 21 bp, Artificial Sequence
  source: /note="Description of Artificial Sequence: Synthetic oligonucleotide"
agaacaagcacagaaggaagc

SEQ ID NO: 38125 - DNA, 21 bp, Artificial Sequence
  source: /note="Description of Artificial Sequence: Synthetic oligonucleotide"
agaacaagcacatacggagga

SEQ ID NO: 38126 - DNA, 21 bp, Artificial Sequence
  source: /note="Description of Artificial Sequence: Synthetic oligonucleotide"
agaacaagcgtcgcagtcgca

SEQ ID NO: 38127 - DNA, 21 bp, Artificial Sequence
  source: /note="Description of Artificial Sequence: Synthetic oligonucleotide"
agaacaacagacaaacaagga

SEQ ID NO: 38128 - DNA, 21 bp, Artificial Sequence
  source: /note="Description of Artificial Sequence: Synthetic oligonucleotide"
agaacaacagaacacagcatg

SEQ ID NO: 38129 - DNA, 21 bp, Artificial Sequence
  source: /note="Description of Artificial Sequence: Synthetic oligonucleotide"
agaacaacacaaagcgtcatg

SEQ ID NO: 38130 - DNA, 21 bp, Artificial Sequence
  source: /note="Description of Artificial Sequence: Synthetic oligonucleotide"
agaacaacaagcgacacattc

SEQ ID NO: 38131 - DNA, 21 bp, Artificial Sequence
  source: /note="Description of Artificial Sequence: Synthetic oligonucleotide"
agaacaacataccaaagcagc

SEQ ID NO: 38132 - DNA, 21 bp, Artificial Sequence
  source: /note="Description of Artificial Sequence: Synthetic oligonucleotide"
agaacagtcggaagcctcaac

SEQ ID NO: 38133 - DNA, 21 bp, Artificial Sequence
  source: /note="Description of Artificial Sequence: Synthetic oligonucleotide"
agaacagtcaaagcagaagca

SEQ ID NO: 38134 - DNA, 21 bp, Artificial Sequence
  source: /note="Description of Artificial Sequence: Synthetic oligonucleotide"
agaacataccacgtcccagac

SEQ ID NO: 38135 - DNA, 21 bp, Artificial Sequence
  source: /note="Description of Artificial Sequence: Synthetic oligonucleotide"
agagtcgcagcaagcagcatc

SEQ ID NO: 38136 - DNA, 21 bp, Artificial Sequence
  source: /note="Description of Artificial Sequence: Synthetic oligonucleotide"
agagtcgcaggaagcaacgga

SEQ ID NO: 38137 - DNA, 21 bp, Artificial Sequence
  source: /note="Description of Artificial Sequence: Synthetic oligonucleotide"
agagtcgcaatgggagaagac

SEQ ID NO: 38138 - DNA, 21 bp, Artificial Sequence
  source: /note="Description of Artificial Sequence: Synthetic oligonucleotide"
agagtcgcaagcccaacagca

SEQ ID NO: 38139 - DNA, 21 bp, Artificial Sequence
  source: /note="Description of Artificial Sequence: Synthetic oligonucleotide"
agagtcgacgcaagccacaga

SEQ ID NO: 38140 - DNA, 21 bp, Artificial Sequence
  source: /note="Description of Artificial Sequence: Synthetic oligonucleotide"
agagtcgacagcgtcagaagc

SEQ ID NO: 38141 - DNA, 21 bp, Artificial Sequence
  source: /note="Description of Artificial Sequence: Synthetic oligonucleotide"
agagtcgacacaagaatgcaa

SEQ ID NO: 38142 - DNA, 21 bp, Artificial Sequence
  source: /note="Description of Artificial Sequence: Synthetic oligonucleotide"
agagtcgaagaatgcgtcatc

SEQ ID NO: 38143 - DNA, 21 bp, Artificial Sequence
  source: /note="Description of Artificial Sequence: Synthetic oligonucleotide"
agagtcggagacggaaaacac

SEQ ID NO: 38144 - DNA, 21 bp, Artificial Sequence
  source: /note="Description of Artificial Sequence: Synthetic oligonucleotide"
agagtcggagacaaactccaa

SEQ ID NO: 38145 - DNA, 21 bp, Artificial Sequence
  source: /note="Description of Artificial Sequence: Synthetic oligonucleotide"
agagtcggagacagcgcattc

SEQ ID NO: 38146 - DNA, 21 bp, Artificial Sequence
  source: /note="Description of Artificial Sequence: Synthetic oligonucleotide"
agagtcggaggaagcagcagc

SEQ ID NO: 38147 - DNA, 21 bp, Artificial Sequence
  source: /note="Description of Artificial Sequence: Synthetic oligonucleotide"
agagtcggacactgcctcgga

SEQ ID NO: 38148 - DNA, 21 bp, Artificial Sequence
  source: /note="Description of Artificial Sequence: Synthetic oligonucleotide"
agagtcggactcgcaagcaca

SEQ ID NO: 38149 - DNA, 21 bp, Artificial Sequence
  source: /note="Description of Artificial Sequence: Synthetic oligonucleotide"
agagtcggaaacgtcgacaca

SEQ ID NO: 38150 - DNA, 21 bp, Artificial Sequence
  source: /note="Description of Artificial Sequence: Synthetic oligonucleotide"
agagtcggaagaccaagcgaa

SEQ ID NO: 38151 - DNA, 21 bp, Artificial Sequence
  source: /note="Description of Artificial Sequence: Synthetic oligonucleotide"
agagtcatcccagcatgccaa

SEQ ID NO: 38152 - DNA, 21 bp, Artificial Sequence
  source: /note="Description of Artificial Sequence: Synthetic oligonucleotide"
agagtcctcgacctcgaaaac

SEQ ID NO: 38153 - DNA, 21 bp, Artificial Sequence
  source: /note="Description of Artificial Sequence: Synthetic oligonucleotide"
agagtcctcatcgaaccagtc

SEQ ID NO: 38154 - DNA, 21 bp, Artificial Sequence
  source: /note="Description of Artificial Sequence: Synthetic oligonucleotide"
agagtcctcaaccacctcgga

SEQ ID NO: 38155 - DNA, 21 bp, Artificial Sequence
  source: /note="Description of Artificial Sequence: Synthetic oligonucleotide"
agagtcatggacagagcagca

SEQ ID NO: 38156 - DNA, 21 bp, Artificial Sequence
  source: /note="Description of Artificial Sequence: Synthetic oligonucleotide"
agagtcaacgcaccaggagtc

SEQ ID NO: 38157 - DNA, 21 bp, Artificial Sequence
  source: /note="Description of Artificial Sequence: Synthetic oligonucleotide"
agagtcaaccacgacgaaaca

SEQ ID NO: 38158 - DNA, 21 bp, Artificial Sequence
  source: /note="Description of Artificial Sequence: Synthetic oligonucleotide"
agagtcaacatcctcgcagaa

SEQ ID NO: 38159 - DNA, 21 bp, Artificial Sequence
  source: /note="Description of Artificial Sequence: Synthetic oligonucleotide"
agagtcaacccagacagatac

SEQ ID NO: 38160 - DNA, 21 bp, Artificial Sequence
  source: /note="Description of Artificial Sequence: Synthetic oligonucleotide"
agagtcaacagcatcgcaagc

SEQ ID NO: 38161 - DNA, 21 bp, Artificial Sequence
  source: /note="Description of Artificial Sequence: Synthetic oligonucleotide"
agagtcccagacatcgcaaga

SEQ ID NO: 38162 - DNA, 21 bp, Artificial Sequence
  source: /note="Description of Artificial Sequence: Synthetic oligonucleotide"
agagtcccagacagcacaaga

SEQ ID NO: 38163 - DNA, 21 bp, Artificial Sequence
  source: /note="Description of Artificial Sequence: Synthetic oligonucleotide"
agagtcccaggaatcctccac

SEQ ID NO: 38164 - DNA, 21 bp, Artificial Sequence
  source: /note="Description of Artificial Sequence: Synthetic oligonucleotide"
agagtcccaaacacactccca

SEQ ID NO: 38165 - DNA, 21 bp, Artificial Sequence
  source: /note="Description of Artificial Sequence: Synthetic oligonucleotide"
agagtcccaaactggccagga

SEQ ID NO: 38166 - DNA, 21 bp, Artificial Sequence
  source: /note="Description of Artificial Sequence: Synthetic oligonucleotide"
agagtcccaagccaaagcagc

SEQ ID NO: 38167 - DNA, 21 bp, Artificial Sequence
  source: /note="Description of Artificial Sequence: Synthetic oligonucleotide"
agagtccaaaacggactcaac

SEQ ID NO: 38168 - DNA, 21 bp, Artificial Sequence
  source: /note="Description of Artificial Sequence: Synthetic oligonucleotide"
agagtccaacaagcaagcctc

SEQ ID NO: 38169 - DNA, 21 bp, Artificial Sequence
  source: /note="Description of Artificial Sequence: Synthetic oligonucleotide"
agagtccaaagcaacgtccca

SEQ ID NO: 38170 - DNA, 21 bp, Artificial Sequence
  source: /note="Description of Artificial Sequence: Synthetic oligonucleotide"
agagtccaaacaatcccaagc

SEQ ID NO: 38171 - DNA, 21 bp, Artificial Sequence
  source: /note="Description of Artificial Sequence: Synthetic oligonucleotide"
agagtcagccaaccagacatg

SEQ ID NO: 38172 - DNA, 21 bp, Artificial Sequence
  source: /note="Description of Artificial Sequence: Synthetic oligonucleotide"
agagtcagccaagtcacaatg

SEQ ID NO: 38173 - DNA, 21 bp, Artificial Sequence
  source: /note="Description of Artificial Sequence: Synthetic oligonucleotide"
agagtcagcacaatcagcaca

SEQ ID NO: 38174 - DNA, 21 bp, Artificial Sequence
  source: /note="Description of Artificial Sequence: Synthetic oligonucleotide"
agagtcagcacaacaagcgac

SEQ ID NO: 38175 - DNA, 21 bp, Artificial Sequence
  source: /note="Description of Artificial Sequence: Synthetic oligonucleotide"
agagtcagctacgacacagaa

SEQ ID NO: 38176 - DNA, 21 bp, Artificial Sequence
  source: /note="Description of Artificial Sequence: Synthetic oligonucleotide"
agagtcacaatcggaacaagc

SEQ ID NO: 38177 - DNA, 21 bp, Artificial Sequence
  source: /note="Description of Artificial Sequence: Synthetic oligonucleotide"
agagtcacaccagaactcttc

SEQ ID NO: 38178 - DNA, 21 bp, Artificial Sequence
  source: /note="Description of Artificial Sequence: Synthetic oligonucleotide"
agagtcacaagcacactcagc

SEQ ID NO: 38179 - DNA, 21 bp, Artificial Sequence
  source: /note="Description of Artificial Sequence: Synthetic oligonucleotide"
agagtcacaacagcagaactc

SEQ ID NO: 38180 - DNA, 21 bp, Artificial Sequence
  source: /note="Description of Artificial Sequence: Synthetic oligonucleotide"
agagtcacaacagaactccca

SEQ ID NO: 38181 - DNA, 21 bp, Artificial Sequence
  source: /note="Description of Artificial Sequence: Synthetic oligonucleotide"
agagtcgtcggaggaagcaca

SEQ ID NO: 38182 - DNA, 21 bp, Artificial Sequence
  source: /note="Description of Artificial Sequence: Synthetic oligonucleotide"
agagtcgtcggaccagtcaac

SEQ ID NO: 38183 - DNA, 21 bp, Artificial Sequence
  source: /note="Description of Artificial Sequence: Synthetic oligonucleotide"
agagtcgtcacagtcctcgaa

SEQ ID NO: 38184 - DNA, 21 bp, Artificial Sequence
  source: /note="Description of Artificial Sequence: Synthetic oligonucleotide"
agagtctacaacatggacgga

SEQ ID NO: 38185 - DNA, 21 bp, Artificial Sequence
  source: /note="Description of Artificial Sequence: Synthetic oligonucleotide"
agatgggcagacacagtcaca

SEQ ID NO: 38186 - DNA, 21 bp, Artificial Sequence
  source: /note="Description of Artificial Sequence: Synthetic oligonucleotide"
agatgggacgacggagcaaga

SEQ ID NO: 38187 - DNA, 21 bp, Artificial Sequence
  source: /note="Description of Artificial Sequence: Synthetic oligonucleotide"
agatgggacgtcaaagcagac

SEQ ID NO: 38188 - DNA, 21 bp, Artificial Sequence
  source: /note="Description of Artificial Sequence: Synthetic oligonucleotide"
agatggaaagcagaaccacca

SEQ ID NO: 38189 - DNA, 21 bp, Artificial Sequence
  source: /note="Description of Artificial Sequence: Synthetic oligonucleotide"
agatggagcgaagacggagga

SEQ ID NO: 38190 - DNA, 21 bp, Artificial Sequence
  source: /note="Description of Artificial Sequence: Synthetic oligonucleotide"
agatggagcccagcagtccca

SEQ ID NO: 38191 - DNA, 21 bp, Artificial Sequence
  source: /note="Description of Artificial Sequence: Synthetic oligonucleotide"
agatacgcagaaccatacatc

SEQ ID NO: 38192 - DNA, 21 bp, Artificial Sequence
  source: /note="Description of Artificial Sequence: Synthetic oligonucleotide"
agatacgacctcacagcacca

SEQ ID NO: 38193 - DNA, 21 bp, Artificial Sequence
  source: /note="Description of Artificial Sequence: Synthetic oligonucleotide"
agatacgaaagcaacgcacac

SEQ ID NO: 38194 - DNA, 21 bp, Artificial Sequence
  source: /note="Description of Artificial Sequence: Synthetic oligonucleotide"
agatacggagcaagcaaccca

SEQ ID NO: 38195 - DNA, 21 bp, Artificial Sequence
  source: /note="Description of Artificial Sequence: Synthetic oligonucleotide"
agatacggaggaagcatcagc

SEQ ID NO: 38196 - DNA, 21 bp, Artificial Sequence
  source: /note="Description of Artificial Sequence: Synthetic oligonucleotide"
agataccacgacacaggagac

SEQ ID NO: 38197 - DNA, 21 bp, Artificial Sequence
  source: /note="Description of Artificial Sequence: Synthetic oligonucleotide"
agatacctcgacagaacagaa

SEQ ID NO: 38198 - DNA, 21 bp, Artificial Sequence
  source: /note="Description of Artificial Sequence: Synthetic oligonucleotide"
agatacatggaaccaagccca

SEQ ID NO: 38199 - DNA, 21 bp, Artificial Sequence
  source: /note="Description of Artificial Sequence: Synthetic oligonucleotide"
agatacaacgaagacgaagca

SEQ ID NO: 38200 - DNA, 21 bp, Artificial Sequence
  source: /note="Description of Artificial Sequence: Synthetic oligonucleotide"
agatacaacgaaacagtcagc

SEQ ID NO: 38201 - DNA, 21 bp, Artificial Sequence
  source: /note="Description of Artificial Sequence: Synthetic oligonucleotide"
agatacaacaaccaagtccca

SEQ ID NO: 38202 - DNA, 21 bp, Artificial Sequence
  source: /note="Description of Artificial Sequence: Synthetic oligonucleotide"
agatacaacacagcaatcagc

SEQ ID NO: 38203 - DNA, 21 bp, Artificial Sequence
  source: /note="Description of Artificial Sequence: Synthetic oligonucleotide"
agatacccaagccaaacaagc

SEQ ID NO: 38204 - DNA, 21 bp, Artificial Sequence
  source: /note="Description of Artificial Sequence: Synthetic oligonucleotide"
agatacagcaacaacctccca

SEQ ID NO: 38205 - DNA, 21 bp, Artificial Sequence
  source: /note="Description of Artificial Sequence: Synthetic oligonucleotide"
agatacagcccaggaagccca

SEQ ID NO: 38206 - DNA, 21 bp, Artificial Sequence
  source: /note="Description of Artificial Sequence: Synthetic oligonucleotide"
agatacacagtcgcagacgca

SEQ ID NO: 38207 - DNA, 21 bp, Artificial Sequence
  source: /note="Description of Artificial Sequence: Synthetic oligonucleotide"
agatacgtcgacccactcatg

SEQ ID NO: 38208 - DNA, 21 bp, Artificial Sequence
  source: /note="Description of Artificial Sequence: Synthetic oligonucleotide"
agcgcagcacacatcgacctc

SEQ ID NO: 38209 - DNA, 21 bp, Artificial Sequence
  source: /note="Description of Artificial Sequence: Synthetic oligonucleotide"
agcgcagcactcctcgaacca

SEQ ID NO: 38210 - DNA, 21 bp, Artificial Sequence
  source: /note="Description of Artificial Sequence: Synthetic oligonucleotide"
agcgcagcactcagagaagga

SEQ ID NO: 38211 - DNA, 21 bp, Artificial Sequence
  source: /note="Description of Artificial Sequence: Synthetic oligonucleotide"
agcgcagcaagagacacagac

SEQ ID NO: 38212 - DNA, 21 bp, Artificial Sequence
  source: /note="Description of Artificial Sequence: Synthetic oligonucleotide"
agcgcagcaagaatgacagca

SEQ ID NO: 38213 - DNA, 21 bp, Artificial Sequence
  source: /note="Description of Artificial Sequence: Synthetic oligonucleotide"
agcgcagcaagcggacaccac

SEQ ID NO: 38214 - DNA, 21 bp, Artificial Sequence
  source: /note="Description of Artificial Sequence: Synthetic oligonucleotide"
agcgcagcaagcaaactcctc

SEQ ID NO: 38215 - DNA, 21 bp, Artificial Sequence
  source: /note="Description of Artificial Sequence: Synthetic oligonucleotide"
agcgcagcaagcagcatgaga

SEQ ID NO: 38216 - DNA, 21 bp, Artificial Sequence
  source: /note="Description of Artificial Sequence: Synthetic oligonucleotide"
agcgcagcaagcacagtcttc

SEQ ID NO: 38217 - DNA, 21 bp, Artificial Sequence
  source: /note="Description of Artificial Sequence: Synthetic oligonucleotide"
agcgcagcatacgacccaaaa

SEQ ID NO: 38218 - DNA, 21 bp, Artificial Sequence
  source: /note="Description of Artificial Sequence: Synthetic oligonucleotide"
agcgcagacttccaaagagga

SEQ ID NO: 38219 - DNA, 21 bp, Artificial Sequence
  source: /note="Description of Artificial Sequence: Synthetic oligonucleotide"
agcgcagacacaatgctcatc

SEQ ID NO: 38220 - DNA, 21 bp, Artificial Sequence
  source: /note="Description of Artificial Sequence: Synthetic oligonucleotide"
agcgcagaagcacacatcaca

SEQ ID NO: 38221 - DNA, 21 bp, Artificial Sequence
  source: /note="Description of Artificial Sequence: Synthetic oligonucleotide"
agcgcagaaatcgaattcctc

SEQ ID NO: 38222 - DNA, 21 bp, Artificial Sequence
  source: /note="Description of Artificial Sequence: Synthetic oligonucleotide"
agcgcagaaagcgtcccacac

SEQ ID NO: 38223 - DNA, 21 bp, Artificial Sequence
  source: /note="Description of Artificial Sequence: Synthetic oligonucleotide"
agcgcagaatacagaagcgtc

SEQ ID NO: 38224 - DNA, 21 bp, Artificial Sequence
  source: /note="Description of Artificial Sequence: Synthetic oligonucleotide"
agcgcattcggacaacacgga

SEQ ID NO: 38225 - DNA, 21 bp, Artificial Sequence
  source: /note="Description of Artificial Sequence: Synthetic oligonucleotide"
agcgcattcctcccacacgca

SEQ ID NO: 38226 - DNA, 21 bp, Artificial Sequence
  source: /note="Description of Artificial Sequence: Synthetic oligonucleotide"
agcgcattcctcccaacacca

SEQ ID NO: 38227 - DNA, 21 bp, Artificial Sequence
  source: /note="Description of Artificial Sequence: Synthetic oligonucleotide"
agcgcattcagcgcaggagca

SEQ ID NO: 38228 - DNA, 21 bp, Artificial Sequence
  source: /note="Description of Artificial Sequence: Synthetic oligonucleotide"
agcgcattcacaaactaccca

SEQ ID NO: 38229 - DNA, 21 bp, Artificial Sequence
  source: /note="Description of Artificial Sequence: Synthetic oligonucleotide"
agcgcaggagaaagaagcctc

SEQ ID NO: 38230 - DNA, 21 bp, Artificial Sequence
  source: /note="Description of Artificial Sequence: Synthetic oligonucleotide"
agcgcaggaggagaaagaaca

SEQ ID NO: 38231 - DNA, 21 bp, Artificial Sequence
  source: /note="Description of Artificial Sequence: Synthetic oligonucleotide"
agcgcaggaggaggaatgaac

SEQ ID NO: 38232 - DNA, 21 bp, Artificial Sequence
  source: /note="Description of Artificial Sequence: Synthetic oligonucleotide"
agcgcaggaaaactcccaatg

SEQ ID NO: 38233 - DNA, 21 bp, Artificial Sequence
  source: /note="Description of Artificial Sequence: Synthetic oligonucleotide"
agcgcaggactccacgcagtc

SEQ ID NO: 38234 - DNA, 21 bp, Artificial Sequence
  source: /note="Description of Artificial Sequence: Synthetic oligonucleotide"
agcgcaggaccagcaccaaga

SEQ ID NO: 38235 - DNA, 21 bp, Artificial Sequence
  source: /note="Description of Artificial Sequence: Synthetic oligonucleotide"
agcgcaggacaaagccaaaga

SEQ ID NO: 38236 - DNA, 21 bp, Artificial Sequence
  source: /note="Description of Artificial Sequence: Synthetic oligonucleotide"
agcgcaggaagattcgaaaca

SEQ ID NO: 38237 - DNA, 21 bp, Artificial Sequence
  source: /note="Description of Artificial Sequence: Synthetic oligonucleotide"
agcgcaggaacagcaatgatc

SEQ ID NO: 38238 - DNA, 21 bp, Artificial Sequence
  source: /note="Description of Artificial Sequence: Synthetic oligonucleotide"
agcgcaggagtccacaaaagc

SEQ ID NO: 38239 - DNA, 21 bp, Artificial Sequence
  source: /note="Description of Artificial Sequence: Synthetic oligonucleotide"
agcgcacactgcccaacacca

SEQ ID NO: 38240 - DNA, 21 bp, Artificial Sequence
  source: /note="Description of Artificial Sequence: Synthetic oligonucleotide"
agcgcacaccacagccacatg

SEQ ID NO: 38241 - DNA, 21 bp, Artificial Sequence
  source: /note="Description of Artificial Sequence: Synthetic oligonucleotide"
agcgcacacatgagcagagca

SEQ ID NO: 38242 - DNA, 21 bp, Artificial Sequence
  source: /note="Description of Artificial Sequence: Synthetic oligonucleotide"
agcgcacaccaactccaaaca

SEQ ID NO: 38243 - DNA, 21 bp, Artificial Sequence
  source: /note="Description of Artificial Sequence: Synthetic oligonucleotide"
agcgcacacagcccacaaatg

SEQ ID NO: 38244 - DNA, 21 bp, Artificial Sequence
  source: /note="Description of Artificial Sequence: Synthetic oligonucleotide"
agcgcacacagcacaccacac

SEQ ID NO: 38245 - DNA, 21 bp, Artificial Sequence
  source: /note="Description of Artificial Sequence: Synthetic oligonucleotide"
agcgcaatctgccaaagcgtc

SEQ ID NO: 38246 - DNA, 21 bp, Artificial Sequence
  source: /note="Description of Artificial Sequence: Synthetic oligonucleotide"
agcgcaatcatgccaagccca

SEQ ID NO: 38247 - DNA, 21 bp, Artificial Sequence
  source: /note="Description of Artificial Sequence: Synthetic oligonucleotide"
agcgcaatcatgagcagaagc

SEQ ID NO: 38248 - DNA, 21 bp, Artificial Sequence
  source: /note="Description of Artificial Sequence: Synthetic oligonucleotide"
agcgcaatcaacagactccca

SEQ ID NO: 38249 - DNA, 21 bp, Artificial Sequence
  source: /note="Description of Artificial Sequence: Synthetic oligonucleotide"
agcgcaatcagcagcatgagc

SEQ ID NO: 38250 - DNA, 21 bp, Artificial Sequence
  source: /note="Description of Artificial Sequence: Synthetic oligonucleotide"
agcgcaaaatgcgtccaagca

SEQ ID NO: 38251 - DNA, 21 bp, Artificial Sequence
  source: /note="Description of Artificial Sequence: Synthetic oligonucleotide"
agcgcaaaacacagcgcaatg

SEQ ID NO: 38252 - DNA, 21 bp, Artificial Sequence
  source: /note="Description of Artificial Sequence: Synthetic oligonucleotide"
agcgcaaaaagcgcattcagc

SEQ ID NO: 38253 - DNA, 21 bp, Artificial Sequence
  source: /note="Description of Artificial Sequence: Synthetic oligonucleotide"
agcgcaaaaagcatggtcgtc

SEQ ID NO: 38254 - DNA, 21 bp, Artificial Sequence
  source: /note="Description of Artificial Sequence: Synthetic oligonucleotide"
agcgcaaaaacaatgatccca

SEQ ID NO: 38255 - DNA, 21 bp, Artificial Sequence
  source: /note="Description of Artificial Sequence: Synthetic oligonucleotide"
agcgcaaaaacaagcgaaagc

SEQ ID NO: 38256 - DNA, 21 bp, Artificial Sequence
  source: /note="Description of Artificial Sequence: Synthetic oligonucleotide"
agcgcactcgcaggactcagc

SEQ ID NO: 38257 - DNA, 21 bp, Artificial Sequence
  source: /note="Description of Artificial Sequence: Synthetic oligonucleotide"
agcgcactcgacctcaaccac

SEQ ID NO: 38258 - DNA, 21 bp, Artificial Sequence
  source: /note="Description of Artificial Sequence: Synthetic oligonucleotide"
agcgcactcgacaacatcaga

SEQ ID NO: 38259 - DNA, 21 bp, Artificial Sequence
  source: /note="Description of Artificial Sequence: Synthetic oligonucleotide"
agcgcactcggactcagcgtc

SEQ ID NO: 38260 - DNA, 21 bp, Artificial Sequence
  source: /note="Description of Artificial Sequence: Synthetic oligonucleotide"
agcgcactcggaagcagagtc

SEQ ID NO: 38261 - DNA, 21 bp, Artificial Sequence
  source: /note="Description of Artificial Sequence: Synthetic oligonucleotide"
agcgcactccacctcgcagca

SEQ ID NO: 38262 - DNA, 21 bp, Artificial Sequence
  source: /note="Description of Artificial Sequence: Synthetic oligonucleotide"
agcgcactcaaaacagacagc

SEQ ID NO: 38263 - DNA, 21 bp, Artificial Sequence
  source: /note="Description of Artificial Sequence: Synthetic oligonucleotide"
agcgcactcaacaaaagaatc

SEQ ID NO: 38264 - DNA, 21 bp, Artificial Sequence
  source: /note="Description of Artificial Sequence: Synthetic oligonucleotide"
agcgcactcccaaaaccagaa

SEQ ID NO: 38265 - DNA, 21 bp, Artificial Sequence
  source: /note="Description of Artificial Sequence: Synthetic oligonucleotide"
agcgcactcagactcgtcagc

SEQ ID NO: 38266 - DNA, 21 bp, Artificial Sequence
  source: /note="Description of Artificial Sequence: Synthetic oligonucleotide"
agcgcactcagaccagacagc

SEQ ID NO: 38267 - DNA, 21 bp, Artificial Sequence
  source: /note="Description of Artificial Sequence: Synthetic oligonucleotide"
agcgcactcagaagcgtcaca

SEQ ID NO: 38268 - DNA, 21 bp, Artificial Sequence
  source: /note="Description of Artificial Sequence: Synthetic oligonucleotide"
agcgcactcagagtcccagca

SEQ ID NO: 38269 - DNA, 21 bp, Artificial Sequence
  source: /note="Description of Artificial Sequence: Synthetic oligonucleotide"
agcgcactcagcacaacagga

SEQ ID NO: 38270 - DNA, 21 bp, Artificial Sequence
  source: /note="Description of Artificial Sequence: Synthetic oligonucleotide"
agcgcactcacagacaaactc

SEQ ID NO: 38271 - DNA, 21 bp, Artificial Sequence
  source: /note="Description of Artificial Sequence: Synthetic oligonucleotide"
agcgcactcacacacgtcagc

SEQ ID NO: 38272 - DNA, 21 bp, Artificial Sequence
  source: /note="Description of Artificial Sequence: Synthetic oligonucleotide"
agcgcactcacaagcagcctc

SEQ ID NO: 38273 - DNA, 21 bp, Artificial Sequence
  source: /note="Description of Artificial Sequence: Synthetic oligonucleotide"
agcgcaatgcacccaatgctc

SEQ ID NO: 38274 - DNA, 21 bp, Artificial Sequence
  source: /note="Description of Artificial Sequence: Synthetic oligonucleotide"
agcgcaatgaaacacccaagc

SEQ ID NO: 38275 - DNA, 21 bp, Artificial Sequence
  source: /note="Description of Artificial Sequence: Synthetic oligonucleotide"
agcgcaatgagaccaggaagc

SEQ ID NO: 38276 - DNA, 21 bp, Artificial Sequence
  source: /note="Description of Artificial Sequence: Synthetic oligonucleotide"
agcgcaatgacaaaaaacctc

SEQ ID NO: 38277 - DNA, 21 bp, Artificial Sequence
  source: /note="Description of Artificial Sequence: Synthetic oligonucleotide"
agcgcaaacggaagcagcagc

SEQ ID NO: 38278 - DNA, 21 bp, Artificial Sequence
  source: /note="Description of Artificial Sequence: Synthetic oligonucleotide"
agcgcaaacatcacagtcaaa

SEQ ID NO: 38279 - DNA, 21 bp, Artificial Sequence
  source: /note="Description of Artificial Sequence: Synthetic oligonucleotide"
agcgcaaacccacacatcaca

SEQ ID NO: 38280 - DNA, 21 bp, Artificial Sequence
  source: /note="Description of Artificial Sequence: Synthetic oligonucleotide"
agcgcaaacagcctcccagca

SEQ ID NO: 38281 - DNA, 21 bp, Artificial Sequence
  source: /note="Description of Artificial Sequence: Synthetic oligonucleotide"
agcgcaaacacagcaagaagc

SEQ ID NO: 38282 - DNA, 21 bp, Artificial Sequence
  source: /note="Description of Artificial Sequence: Synthetic oligonucleotide"
agcgcaccagaatggatgcca

SEQ ID NO: 38283 - DNA, 21 bp, Artificial Sequence
  source: /note="Description of Artificial Sequence: Synthetic oligonucleotide"
agcgcaccattcgcaacagaa

SEQ ID NO: 38284 - DNA, 21 bp, Artificial Sequence
  source: /note="Description of Artificial Sequence: Synthetic oligonucleotide"
agcgcaccaggagcaagcttc

SEQ ID NO: 38285 - DNA, 21 bp, Artificial Sequence
  source: /note="Description of Artificial Sequence: Synthetic oligonucleotide"
agcgcaccacacacacacctc

SEQ ID NO: 38286 - DNA, 21 bp, Artificial Sequence
  source: /note="Description of Artificial Sequence: Synthetic oligonucleotide"
agcgcaccacacacaatccca

SEQ ID NO: 38287 - DNA, 21 bp, Artificial Sequence
  source: /note="Description of Artificial Sequence: Synthetic oligonucleotide"
agcgcaccactcatcggaagc

SEQ ID NO: 38288 - DNA, 21 bp, Artificial Sequence
  source: /note="Description of Artificial Sequence: Synthetic oligonucleotide"
agcgcaccaatgacatgcgca

SEQ ID NO: 38289 - DNA, 21 bp, Artificial Sequence
  source: /note="Description of Artificial Sequence: Synthetic oligonucleotide"
agcgcaccaaacagcagcagc

SEQ ID NO: 38290 - DNA, 21 bp, Artificial Sequence
  source: /note="Description of Artificial Sequence: Synthetic oligonucleotide"
agcgcaccagtcagaagccca

SEQ ID NO: 38291 - DNA, 21 bp, Artificial Sequence
  source: /note="Description of Artificial Sequence: Synthetic oligonucleotide"
agcgcacaaggagcaagacca

SEQ ID NO: 38292 - DNA, 21 bp, Artificial Sequence
  source: /note="Description of Artificial Sequence: Synthetic oligonucleotide"
agcgcacaactcagcctccca

SEQ ID NO: 38293 - DNA, 21 bp, Artificial Sequence
  source: /note="Description of Artificial Sequence: Synthetic oligonucleotide"
agcgcaagagacgcacacagc

SEQ ID NO: 38294 - DNA, 21 bp, Artificial Sequence
  source: /note="Description of Artificial Sequence: Synthetic oligonucleotide"
agcgcaagagaccacagacca

SEQ ID NO: 38295 - DNA, 21 bp, Artificial Sequence
  source: /note="Description of Artificial Sequence: Synthetic oligonucleotide"
agcgcaagaggaagcgaccca

SEQ ID NO: 38296 - DNA, 21 bp, Artificial Sequence
  source: /note="Description of Artificial Sequence: Synthetic oligonucleotide"
agcgcaagaggagtcgcaaca

SEQ ID NO: 38297 - DNA, 21 bp, Artificial Sequence
  source: /note="Description of Artificial Sequence: Synthetic oligonucleotide"
agcgcaagaatcttcaaagac

SEQ ID NO: 38298 - DNA, 21 bp, Artificial Sequence
  source: /note="Description of Artificial Sequence: Synthetic oligonucleotide"
agcgcaagaatggcactcgga

SEQ ID NO: 38299 - DNA, 21 bp, Artificial Sequence
  source: /note="Description of Artificial Sequence: Synthetic oligonucleotide"
agcgcaagacaagtcagcgga

SEQ ID NO: 38300 - DNA, 21 bp, Artificial Sequence
  source: /note="Description of Artificial Sequence: Synthetic oligonucleotide"
agcgcaagaagcgacccagca

SEQ ID NO: 38301 - DNA, 21 bp, Artificial Sequence
  source: /note="Description of Artificial Sequence: Synthetic oligonucleotide"
agcgcaagaacagcaggacca

SEQ ID NO: 38302 - DNA, 21 bp, Artificial Sequence
  source: /note="Description of Artificial Sequence: Synthetic oligonucleotide"
agcgcaagaacagacagaaca

SEQ ID NO: 38303 - DNA, 21 bp, Artificial Sequence
  source: /note="Description of Artificial Sequence: Synthetic oligonucleotide"
agcgcaagaacagtcgacatg

SEQ ID NO: 38304 - DNA, 21 bp, Artificial Sequence
  source: /note="Description of Artificial Sequence: Synthetic oligonucleotide"
agcgcaagagtcttcccagca

SEQ ID NO: 38305 - DNA, 21 bp, Artificial Sequence
  source: /note="Description of Artificial Sequence: Synthetic oligonucleotide"
agcgcaagagtcaacatcgga

SEQ ID NO: 38306 - DNA, 21 bp, Artificial Sequence
  source: /note="Description of Artificial Sequence: Synthetic oligonucleotide"
agcgcaagagtcagcaacagc

SEQ ID NO: 38307 - DNA, 21 bp, Artificial Sequence
  source: /note="Description of Artificial Sequence: Synthetic oligonucleotide"
agcgcaagcgcactcgtcctc

SEQ ID NO: 38308 - DNA, 21 bp, Artificial Sequence
  source: /note="Description of Artificial Sequence: Synthetic oligonucleotide"
agcgcaagcgaaagattcaga

SEQ ID NO: 38309 - DNA, 21 bp, Artificial Sequence
  source: /note="Description of Artificial Sequence: Synthetic oligonucleotide"
agcgcaagcgaaagcagcatg

SEQ ID NO: 38310 - DNA, 21 bp, Artificial Sequence
  source: /note="Description of Artificial Sequence: Synthetic oligonucleotide"
agcgcaagcatccaagtcatg

SEQ ID NO: 38311 - DNA, 21 bp, Artificial Sequence
  source: /note="Description of Artificial Sequence: Synthetic oligonucleotide"
agcgcaagcaaaccaacaagc

SEQ ID NO: 38312 - DNA, 21 bp, Artificial Sequence
  source: /note="Description of Artificial Sequence: Synthetic oligonucleotide"
agcgcaagcctcagactccca

SEQ ID NO: 38313 - DNA, 21 bp, Artificial Sequence
  source: /note="Description of Artificial Sequence: Synthetic oligonucleotide"
agcgcaagcatgagagcactc

SEQ ID NO: 38314 - DNA, 21 bp, Artificial Sequence
  source: /note="Description of Artificial Sequence: Synthetic oligonucleotide"
agcgcaagcaacagcgtcgga

SEQ ID NO: 38315 - DNA, 21 bp, Artificial Sequence
  source: /note="Description of Artificial Sequence: Synthetic oligonucleotide"
agcgcaagcccagcaggacac

SEQ ID NO: 38316 - DNA, 21 bp, Artificial Sequence
  source: /note="Description of Artificial Sequence: Synthetic oligonucleotide"
agcgcaagcccacaaagaaca

SEQ ID NO: 38317 - DNA, 21 bp, Artificial Sequence
  source: /note="Description of Artificial Sequence: Synthetic oligonucleotide"
agcgcaagcagacaaatccca

SEQ ID NO: 38318 - DNA, 21 bp, Artificial Sequence
  source: /note="Description of Artificial Sequence: Synthetic oligonucleotide"
agcgcaagcagcgcagcacaa

SEQ ID NO: 38319 - DNA, 21 bp, Artificial Sequence
  source: /note="Description of Artificial Sequence: Synthetic oligonucleotide"
agcgcaagcagcaaaacagga

SEQ ID NO: 38320 - DNA, 21 bp, Artificial Sequence
  source: /note="Description of Artificial Sequence: Synthetic oligonucleotide"
agcgcaagcacaccaaaacac

SEQ ID NO: 38321 - DNA, 21 bp, Artificial Sequence
  source: /note="Description of Artificial Sequence: Synthetic oligonucleotide"
agcgcaagcacacaaatcagc

SEQ ID NO: 38322 - DNA, 21 bp, Artificial Sequence
  source: /note="Description of Artificial Sequence: Synthetic oligonucleotide"
agcgcaagcgtcagaggaaac

SEQ ID NO: 38323 - DNA, 21 bp, Artificial Sequence
  source: /note="Description of Artificial Sequence: Synthetic oligonucleotide"
agcgcaagcgtcacatacagc

SEQ ID NO: 38324 - DNA, 21 bp, Artificial Sequence
  source: /note="Description of Artificial Sequence: Synthetic oligonucleotide"
agcgcaacattcgacacaaca

SEQ ID NO: 38325 - DNA, 21 bp, Artificial Sequence
  source: /note="Description of Artificial Sequence: Synthetic oligonucleotide"
agcgcaacactcagcgcactc

SEQ ID NO: 38326 - DNA, 21 bp, Artificial Sequence
  source: /note="Description of Artificial Sequence: Synthetic oligonucleotide"
agcgcaacaccacacagagca

SEQ ID NO: 38327 - DNA, 21 bp, Artificial Sequence
  source: /note="Description of Artificial Sequence: Synthetic oligonucleotide"
agcgcaacaccaatcagcaga

SEQ ID NO: 38328 - DNA, 21 bp, Artificial Sequence
  source: /note="Description of Artificial Sequence: Synthetic oligonucleotide"
agcgcaacacaacacacagga

SEQ ID NO: 38329 - DNA, 21 bp, Artificial Sequence
  source: /note="Description of Artificial Sequence: Synthetic oligonucleotide"
agcgcaacacaaagaatcgtc

SEQ ID NO: 38330 - DNA, 21 bp, Artificial Sequence
  source: /note="Description of Artificial Sequence: Synthetic oligonucleotide"
agcgcaacaagcccagacaga

SEQ ID NO: 38331 - DNA, 21 bp, Artificial Sequence
  source: /note="Description of Artificial Sequence: Synthetic oligonucleotide"
agcgcaacagtcccaagacca

SEQ ID NO: 38332 - DNA, 21 bp, Artificial Sequence
  source: /note="Description of Artificial Sequence: Synthetic oligonucleotide"
agcgcagtcgcaatcctcaca

SEQ ID NO: 38333 - DNA, 21 bp, Artificial Sequence
  source: /note="Description of Artificial Sequence: Synthetic oligonucleotide"
agcgcagtcggagcacacagc

SEQ ID NO: 38334 - DNA, 21 bp, Artificial Sequence
  source: /note="Description of Artificial Sequence: Synthetic oligonucleotide"
agcgcagtcggaaacgcaaga

SEQ ID NO: 38335 - DNA, 21 bp, Artificial Sequence
  source: /note="Description of Artificial Sequence: Synthetic oligonucleotide"
agcgcagtcggaagaagcaca

SEQ ID NO: 38336 - DNA, 21 bp, Artificial Sequence
  source: /note="Description of Artificial Sequence: Synthetic oligonucleotide"
agcgcagtcggaacaagctac

SEQ ID NO: 38337 - DNA, 21 bp, Artificial Sequence
  source: /note="Description of Artificial Sequence: Synthetic oligonucleotide"
agcgcagtccacagaatggac

SEQ ID NO: 38338 - DNA, 21 bp, Artificial Sequence
  source: /note="Description of Artificial Sequence: Synthetic oligonucleotide"
agcgcagtcatcagagcaagc

SEQ ID NO: 38339 - DNA, 21 bp, Artificial Sequence
  source: /note="Description of Artificial Sequence: Synthetic oligonucleotide"
agcgcagtcctcccacaaaga

SEQ ID NO: 38340 - DNA, 21 bp, Artificial Sequence
  source: /note="Description of Artificial Sequence: Synthetic oligonucleotide"
agcgcagtcaacgaagcaaga

SEQ ID NO: 38341 - DNA, 21 bp, Artificial Sequence
  source: /note="Description of Artificial Sequence: Synthetic oligonucleotide"
agcgcagtcaacagcagaatg

SEQ ID NO: 38342 - DNA, 21 bp, Artificial Sequence
  source: /note="Description of Artificial Sequence: Synthetic oligonucleotide"
agcgcagtcagaatggcaaca

SEQ ID NO: 38343 - DNA, 21 bp, Artificial Sequence
  source: /note="Description of Artificial Sequence: Synthetic oligonucleotide"
agcgcagtcagaccactccca

SEQ ID NO: 38344 - DNA, 21 bp, Artificial Sequence
  source: /note="Description of Artificial Sequence: Synthetic oligonucleotide"
agcgcagtcacaggagcatgg

SEQ ID NO: 38345 - DNA, 21 bp, Artificial Sequence
  source: /note="Description of Artificial Sequence: Synthetic oligonucleotide"
agcgcagtcacaagccacatg

SEQ ID NO: 38346 - DNA, 21 bp, Artificial Sequence
  source: /note="Description of Artificial Sequence: Synthetic oligonucleotide"
agcgcagtctaccaaggacac

SEQ ID NO: 38347 - DNA, 21 bp, Artificial Sequence
  source: /note="Description of Artificial Sequence: Synthetic oligonucleotide"
agcgcatggagcagcacagga

SEQ ID NO: 38348 - DNA, 21 bp, Artificial Sequence
  source: /note="Description of Artificial Sequence: Synthetic oligonucleotide"
agcgcatacgcaagcagcagc

SEQ ID NO: 38349 - DNA, 21 bp, Artificial Sequence
  source: /note="Description of Artificial Sequence: Synthetic oligonucleotide"
agcgcataccaaaacatggca

SEQ ID NO: 38350 - DNA, 21 bp, Artificial Sequence
  source: /note="Description of Artificial Sequence: Synthetic oligonucleotide"
agcgcatacgtcgacacaaga

SEQ ID NO: 38351 - DNA, 21 bp, Artificial Sequence
  source: /note="Description of Artificial Sequence: Synthetic oligonucleotide"
agctgcgaactcctcccagca

SEQ ID NO: 38352 - DNA, 21 bp, Artificial Sequence
  source: /note="Description of Artificial Sequence: Synthetic oligonucleotide"
agctgcctcaacggagtccca

SEQ ID NO: 38353 - DNA, 21 bp, Artificial Sequence
  source: /note="Description of Artificial Sequence: Synthetic oligonucleotide"
agcgacgcaatgacaatcgca

SEQ ID NO: 38354 - DNA, 21 bp, Artificial Sequence
  source: /note="Description of Artificial Sequence: Synthetic oligonucleotide"
agcgacgcaaacggaagcagc

SEQ ID NO: 38355 - DNA, 21 bp, Artificial Sequence
  source: /note="Description of Artificial Sequence: Synthetic oligonucleotide"
agcgacgcaaacgtcggaatg

SEQ ID NO: 38356 - DNA, 21 bp, Artificial Sequence
  source: /note="Description of Artificial Sequence: Synthetic oligonucleotide"
agcgacgcaccaccatacaga

SEQ ID NO: 38357 - DNA, 21 bp, Artificial Sequence
  source: /note="Description of Artificial Sequence: Synthetic oligonucleotide"
agcgactgcatcacacacagc

SEQ ID NO: 38358 - DNA, 21 bp, Artificial Sequence
  source: /note="Description of Artificial Sequence: Synthetic oligonucleotide"
agcgacgacggaccaagcgca

SEQ ID NO: 38359 - DNA, 21 bp, Artificial Sequence
  source: /note="Description of Artificial Sequence: Synthetic oligonucleotide"
agcgacgacctcgtcccaaaa

SEQ ID NO: 38360 - DNA, 21 bp, Artificial Sequence
  source: /note="Description of Artificial Sequence: Synthetic oligonucleotide"
agcgacgacagagaaaactgc

SEQ ID NO: 38361 - DNA, 21 bp, Artificial Sequence
  source: /note="Description of Artificial Sequence: Synthetic oligonucleotide"
agcgacgacagcaaaaacaca

SEQ ID NO: 38362 - DNA, 21 bp, Artificial Sequence
  source: /note="Description of Artificial Sequence: Synthetic oligonucleotide"
agcgacgaaagcggaatgcca

SEQ ID NO: 38363 - DNA, 21 bp, Artificial Sequence
  source: /note="Description of Artificial Sequence: Synthetic oligonucleotide"
agcgacggaccaagactcagc

SEQ ID NO: 38364 - DNA, 21 bp, Artificial Sequence
  source: /note="Description of Artificial Sequence: Synthetic oligonucleotide"
agcgacggaagcagcctcgca

SEQ ID NO: 38365 - DNA, 21 bp, Artificial Sequence
  source: /note="Description of Artificial Sequence: Synthetic oligonucleotide"
agcgaccacagatacctcatc

SEQ ID NO: 38366 - DNA, 21 bp, Artificial Sequence
  source: /note="Description of Artificial Sequence: Synthetic oligonucleotide"
agcgaccacagcagcagaaca

SEQ ID NO: 38367 - DNA, 21 bp, Artificial Sequence
  source: /note="Description of Artificial Sequence: Synthetic oligonucleotide"
agcgacatcccaagaccaagc

SEQ ID NO: 38368 - DNA, 21 bp, Artificial Sequence
  source: /note="Description of Artificial Sequence: Synthetic oligonucleotide"
agcgacatcgtcgcaagccca

SEQ ID NO: 38369 - DNA, 21 bp, Artificial Sequence
  source: /note="Description of Artificial Sequence: Synthetic oligonucleotide"
agcgacaaattcttcccaagc

SEQ ID NO: 38370 - DNA, 21 bp, Artificial Sequence
  source: /note="Description of Artificial Sequence: Synthetic oligonucleotide"
agcgacctcaacaaactcgca

SEQ ID NO: 38371 - DNA, 21 bp, Artificial Sequence
  source: /note="Description of Artificial Sequence: Synthetic oligonucleotide"
agcgacctcccaatgctcgtc

SEQ ID NO: 38372 - DNA, 21 bp, Artificial Sequence
  source: /note="Description of Artificial Sequence: Synthetic oligonucleotide"
agcgacctcagaatggtcgca

SEQ ID NO: 38373 - DNA, 21 bp, Artificial Sequence
  source: /note="Description of Artificial Sequence: Synthetic oligonucleotide"
agcgacctcagcagaccactc

SEQ ID NO: 38374 - DNA, 21 bp, Artificial Sequence
  source: /note="Description of Artificial Sequence: Synthetic oligonucleotide"
agcgacatggcaacaaaactc

SEQ ID NO: 38375 - DNA, 21 bp, Artificial Sequence
  source: /note="Description of Artificial Sequence: Synthetic oligonucleotide"
agcgacatgccagtcccaaga

SEQ ID NO: 38376 - DNA, 21 bp, Artificial Sequence
  source: /note="Description of Artificial Sequence: Synthetic oligonucleotide"
agcgacatgacagcaagagga

SEQ ID NO: 38377 - DNA, 21 bp, Artificial Sequence
  source: /note="Description of Artificial Sequence: Synthetic oligonucleotide"
agcgacaactacgaaagaaca

SEQ ID NO: 38378 - DNA, 21 bp, Artificial Sequence
  source: /note="Description of Artificial Sequence: Synthetic oligonucleotide"
agcgacccaggaagaggagca

SEQ ID NO: 38379 - DNA, 21 bp, Artificial Sequence
  source: /note="Description of Artificial Sequence: Synthetic oligonucleotide"
agcgacccaaaatacagcgtc

SEQ ID NO: 38380 - DNA, 21 bp, Artificial Sequence
  source: /note="Description of Artificial Sequence: Synthetic oligonucleotide"
agcgacccaaacacatacatc

SEQ ID NO: 38381 - DNA, 21 bp, Artificial Sequence
  source: /note="Description of Artificial Sequence: Synthetic oligonucleotide"
agcgacccaagaagaacaagc

SEQ ID NO: 38382 - DNA, 21 bp, Artificial Sequence
  source: /note="Description of Artificial Sequence: Synthetic oligonucleotide"
agcgacccaagcctcccagtc

SEQ ID NO: 38383 - DNA, 21 bp, Artificial Sequence
  source: /note="Description of Artificial Sequence: Synthetic oligonucleotide"
agcgacccagtcctcggagca

SEQ ID NO: 38384 - DNA, 21 bp, Artificial Sequence
  source: /note="Description of Artificial Sequence: Synthetic oligonucleotide"
agcgaccaaccaacaaaagca

SEQ ID NO: 38385 - DNA, 21 bp, Artificial Sequence
  source: /note="Description of Artificial Sequence: Synthetic oligonucleotide"
agcgaccaaagaatcctccca

SEQ ID NO: 38386 - DNA, 21 bp, Artificial Sequence
  source: /note="Description of Artificial Sequence: Synthetic oligonucleotide"
agcgaccaaagcctcacatac

SEQ ID NO: 38387 - DNA, 21 bp, Artificial Sequence
  source: /note="Description of Artificial Sequence: Synthetic oligonucleotide"
agcgaccaagtcaaaagcagc

SEQ ID NO: 38388 - DNA, 21 bp, Artificial Sequence
  source: /note="Description of Artificial Sequence: Synthetic oligonucleotide"
agcgacagagaaagcagaatc

SEQ ID NO: 38389 - DNA, 21 bp, Artificial Sequence
  source: /note="Description of Artificial Sequence: Synthetic oligonucleotide"
agcgacagagaagtcgaccca

SEQ ID NO: 38390 - DNA, 21 bp, Artificial Sequence
  source: /note="Description of Artificial Sequence: Synthetic oligonucleotide"
agcgacagaggaatcagagac

SEQ ID NO: 38391 - DNA, 21 bp, Artificial Sequence
  source: /note="Description of Artificial Sequence: Synthetic oligonucleotide"
agcgacagaggatacccaaaa

SEQ ID NO: 38392 - DNA, 21 bp, Artificial Sequence
  source: /note="Description of Artificial Sequence: Synthetic oligonucleotide"
agcgacagactctgcgacgaa

SEQ ID NO: 38393 - DNA, 21 bp, Artificial Sequence
  source: /note="Description of Artificial Sequence: Synthetic oligonucleotide"
agcgacagactccaaacagtc

SEQ ID NO: 38394 - DNA, 21 bp, Artificial Sequence
  source: /note="Description of Artificial Sequence: Synthetic oligonucleotide"
agcgacagaatgatgacattc

SEQ ID NO: 38395 - DNA, 21 bp, Artificial Sequence
  source: /note="Description of Artificial Sequence: Synthetic oligonucleotide"
agcgacagaatgagcagccca

SEQ ID NO: 38396 - DNA, 21 bp, Artificial Sequence
  source: /note="Description of Artificial Sequence: Synthetic oligonucleotide"
agcgacagaccagcactcctc

SEQ ID NO: 38397 - DNA, 21 bp, Artificial Sequence
  source: /note="Description of Artificial Sequence: Synthetic oligonucleotide"
agcgacagaccaggactctac

SEQ ID NO: 38398 - DNA, 21 bp, Artificial Sequence
  source: /note="Description of Artificial Sequence: Synthetic oligonucleotide"
agcgacagacaaccattcaca

SEQ ID NO: 38399 - DNA, 21 bp, Artificial Sequence
  source: /note="Description of Artificial Sequence: Synthetic oligonucleotide"
agcgacagaagagcaatgagc

SEQ ID NO: 38400 - DNA, 21 bp, Artificial Sequence
  source: /note="Description of Artificial Sequence: Synthetic oligonucleotide"
agcgacagaagaaacatggca

SEQ ID NO: 38401 - DNA, 21 bp, Artificial Sequence
  source: /note="Description of Artificial Sequence: Synthetic oligonucleotide"
agcgacagaagcgcaacaagc

SEQ ID NO: 38402 - DNA, 21 bp, Artificial Sequence
  source: /note="Description of Artificial Sequence: Synthetic oligonucleotide"
agcgacagaagcgacaaacca

SEQ ID NO: 38403 - DNA, 21 bp, Artificial Sequence
  source: /note="Description of Artificial Sequence: Synthetic oligonucleotide"
agcgacagcgcacacgcacca

SEQ ID NO: 38404 - DNA, 21 bp, Artificial Sequence
  source: /note="Description of Artificial Sequence: Synthetic oligonucleotide"
agcgacagcggacaaagcgca

SEQ ID NO: 38405 - DNA, 21 bp, Artificial Sequence
  source: /note="Description of Artificial Sequence: Synthetic oligonucleotide"
agcgacagcaaagtcggacca

SEQ ID NO: 38406 - DNA, 21 bp, Artificial Sequence
  source: /note="Description of Artificial Sequence: Synthetic oligonucleotide"
agcgacagcagactcggagca

SEQ ID NO: 38407 - DNA, 21 bp, Artificial Sequence
  source: /note="Description of Artificial Sequence: Synthetic oligonucleotide"
agcgacagcagaagagaatac

SEQ ID NO: 38408 - DNA, 21 bp, Artificial Sequence
  source: /note="Description of Artificial Sequence: Synthetic oligonucleotide"
agcgacagctacggaagcaga

SEQ ID NO: 38409 - DNA, 21 bp, Artificial Sequence
  source: /note="Description of Artificial Sequence: Synthetic oligonucleotide"
agcgacagctacccaagaatc

SEQ ID NO: 38410 - DNA, 21 bp, Artificial Sequence
  source: /note="Description of Artificial Sequence: Synthetic oligonucleotide"
agcgacacaaaactctaccca

SEQ ID NO: 38411 - DNA, 21 bp, Artificial Sequence
  source: /note="Description of Artificial Sequence: Synthetic oligonucleotide"
agcgacacaatgagagcagaa

SEQ ID NO: 38412 - DNA, 21 bp, Artificial Sequence
  source: /note="Description of Artificial Sequence: Synthetic oligonucleotide"
agcgacacaagactcacaaga

SEQ ID NO: 38413 - DNA, 21 bp, Artificial Sequence
  source: /note="Description of Artificial Sequence: Synthetic oligonucleotide"
agcgacacaagaaacggagca

SEQ ID NO: 38414 - DNA, 21 bp, Artificial Sequence
  source: /note="Description of Artificial Sequence: Synthetic oligonucleotide"
agcgacacaacactcctcgac

SEQ ID NO: 38415 - DNA, 21 bp, Artificial Sequence
  source: /note="Description of Artificial Sequence: Synthetic oligonucleotide"
agcgacacatacatgagactc

SEQ ID NO: 38416 - DNA, 21 bp, Artificial Sequence
  source: /note="Description of Artificial Sequence: Synthetic oligonucleotide"
agcgacgtcgcagcaagaagc

SEQ ID NO: 38417 - DNA, 21 bp, Artificial Sequence
  source: /note="Description of Artificial Sequence: Synthetic oligonucleotide"
agcgacgtcgcaatgagagca

SEQ ID NO: 38418 - DNA, 21 bp, Artificial Sequence
  source: /note="Description of Artificial Sequence: Synthetic oligonucleotide"
agcgacgtcaaccaaggactc

SEQ ID NO: 38419 - DNA, 21 bp, Artificial Sequence
  source: /note="Description of Artificial Sequence: Synthetic oligonucleotide"
agcgaagcattcagaccagca

SEQ ID NO: 38420 - DNA, 21 bp, Artificial Sequence
  source: /note="Description of Artificial Sequence: Synthetic oligonucleotide"
agcgaagcaccaaacgacaga

SEQ ID NO: 38421 - DNA, 21 bp, Artificial Sequence
  source: /note="Description of Artificial Sequence: Synthetic oligonucleotide"
agcgaagcaagcgcaagcaga

SEQ ID NO: 38422 - DNA, 21 bp, Artificial Sequence
  source: /note="Description of Artificial Sequence: Synthetic oligonucleotide"
agcgaagcatggctcgcaagc

SEQ ID NO: 38423 - DNA, 21 bp, Artificial Sequence
  source: /note="Description of Artificial Sequence: Synthetic oligonucleotide"
agcgaagacggagacatcaaa

SEQ ID NO: 38424 - DNA, 21 bp, Artificial Sequence
  source: /note="Description of Artificial Sequence: Synthetic oligonucleotide"
agcgaagacagaagcagaaca

SEQ ID NO: 38425 - DNA, 21 bp, Artificial Sequence
  source: /note="Description of Artificial Sequence: Synthetic oligonucleotide"
agcgaagaaagctggggatac

SEQ ID NO: 38426 - DNA, 21 bp, Artificial Sequence
  source: /note="Description of Artificial Sequence: Synthetic oligonucleotide"
agcgaattcgtcagaatgcca

SEQ ID NO: 38427 - DNA, 21 bp, Artificial Sequence
  source: /note="Description of Artificial Sequence: Synthetic oligonucleotide"
agcgaaggagaccacgcactc

SEQ ID NO: 38428 - DNA, 21 bp, Artificial Sequence
  source: /note="Description of Artificial Sequence: Synthetic oligonucleotide"
agcgaaggattcaacgcaatg

SEQ ID NO: 38429 - DNA, 21 bp, Artificial Sequence
  source: /note="Description of Artificial Sequence: Synthetic oligonucleotide"
agcgaaggacacagaggacca

SEQ ID NO: 38430 - DNA, 21 bp, Artificial Sequence
  source: /note="Description of Artificial Sequence: Synthetic oligonucleotide"
agcgaaggaacagtcagagaa

SEQ ID NO: 38431 - DNA, 21 bp, Artificial Sequence
  source: /note="Description of Artificial Sequence: Synthetic oligonucleotide"
agcgaaatccacagactccca

SEQ ID NO: 38432 - DNA, 21 bp, Artificial Sequence
  source: /note="Description of Artificial Sequence: Synthetic oligonucleotide"
agcgaaatcaacagaccagaa

SEQ ID NO: 38433 - DNA, 21 bp, Artificial Sequence
  source: /note="Description of Artificial Sequence: Synthetic oligonucleotide"
agcgaaatcacactcccactc

SEQ ID NO: 38434 - DNA, 21 bp, Artificial Sequence
  source: /note="Description of Artificial Sequence: Synthetic oligonucleotide"
agcgaaaaaagcaacgaaagc

SEQ ID NO: 38435 - DNA, 21 bp, Artificial Sequence
  source: /note="Description of Artificial Sequence: Synthetic oligonucleotide"
agcgaaaaatacgcagcaatg

SEQ ID NO: 38436 - DNA, 21 bp, Artificial Sequence
  source: /note="Description of Artificial Sequence: Synthetic oligonucleotide"
agcgaactcgaagcaagaaca

SEQ ID NO: 38437 - DNA, 21 bp, Artificial Sequence
  source: /note="Description of Artificial Sequence: Synthetic oligonucleotide"
agcgaactccacggactcctc

SEQ ID NO: 38438 - DNA, 21 bp, Artificial Sequence
  source: /note="Description of Artificial Sequence: Synthetic oligonucleotide"
agcgaactcaaaacaagacca

SEQ ID NO: 38439 - DNA, 21 bp, Artificial Sequence
  source: /note="Description of Artificial Sequence: Synthetic oligonucleotide"
agcgaactcagaagcgtcgga

SEQ ID NO: 38440 - DNA, 21 bp, Artificial Sequence
  source: /note="Description of Artificial Sequence: Synthetic oligonucleotide"
agcgaaatggacctcagaagc

SEQ ID NO: 38441 - DNA, 21 bp, Artificial Sequence
  source: /note="Description of Artificial Sequence: Synthetic oligonucleotide"
agcgaaaaccaaatgagaagc

SEQ ID NO: 38442 - DNA, 21 bp, Artificial Sequence
  source: /note="Description of Artificial Sequence: Synthetic oligonucleotide"
agcgaaaacacaagcgaccac

SEQ ID NO: 38443 - DNA, 21 bp, Artificial Sequence
  source: /note="Description of Artificial Sequence: Synthetic oligonucleotide"
agcgaaccaatcagaacagtc

SEQ ID NO: 38444 - DNA, 21 bp, Artificial Sequence
  source: /note="Description of Artificial Sequence: Synthetic oligonucleotide"
agcgaaccaagaagaacacca

SEQ ID NO: 38445 - DNA, 21 bp, Artificial Sequence
  source: /note="Description of Artificial Sequence: Synthetic oligonucleotide"
agcgaaccaagaagccaccca

SEQ ID NO: 38446 - DNA, 21 bp, Artificial Sequence
  source: /note="Description of Artificial Sequence: Synthetic oligonucleotide"
agcgaaccaagcgactacgtc

SEQ ID NO: 38447 - DNA, 21 bp, Artificial Sequence
  source: /note="Description of Artificial Sequence: Synthetic oligonucleotide"
agcgaaccaagcctcagcagc

SEQ ID NO: 38448 - DNA, 21 bp, Artificial Sequence
  source: /note="Description of Artificial Sequence: Synthetic oligonucleotide"
agcgaaccaacagcaagaaac

SEQ ID NO: 38449 - DNA, 21 bp, Artificial Sequence
  source: /note="Description of Artificial Sequence: Synthetic oligonucleotide"
agcgaaccaacaatgatcgtc

SEQ ID NO: 38450 - DNA, 21 bp, Artificial Sequence
  source: /note="Description of Artificial Sequence: Synthetic oligonucleotide"
agcgaaccatacggaagactc

SEQ ID NO: 38451 - DNA, 21 bp, Artificial Sequence
  source: /note="Description of Artificial Sequence: Synthetic oligonucleotide"
agcgaaccataccacgcagca

SEQ ID NO: 38452 - DNA, 21 bp, Artificial Sequence
  source: /note="Description of Artificial Sequence: Synthetic oligonucleotide"
agcgaacaaagcagactcctc

SEQ ID NO: 38453 - DNA, 21 bp, Artificial Sequence
  source: /note="Description of Artificial Sequence: Synthetic oligonucleotide"
agcgaaagattcttcaacgga

SEQ ID NO: 38454 - DNA, 21 bp, Artificial Sequence
  source: /note="Description of Artificial Sequence: Synthetic oligonucleotide"
agcgaaagacacgcatgcagc

SEQ ID NO: 38455 - DNA, 21 bp, Artificial Sequence
  source: /note="Description of Artificial Sequence: Synthetic oligonucleotide"
agcgaaagaccagcagcagca

SEQ ID NO: 38456 - DNA, 21 bp, Artificial Sequence
  source: /note="Description of Artificial Sequence: Synthetic oligonucleotide"
agcgaaagaccaatgccaaaa

SEQ ID NO: 38457 - DNA, 21 bp, Artificial Sequence
  source: /note="Description of Artificial Sequence: Synthetic oligonucleotide"
agcgaaagaacactcatcatg

SEQ ID NO: 38458 - DNA, 21 bp, Artificial Sequence
  source: /note="Description of Artificial Sequence: Synthetic oligonucleotide"
agcgaaagagtcgcagcacac

SEQ ID NO: 38459 - DNA, 21 bp, Artificial Sequence
  source: /note="Description of Artificial Sequence: Synthetic oligonucleotide"
agcgaaagagtcgaaaaacac

SEQ ID NO: 38460 - DNA, 21 bp, Artificial Sequence
  source: /note="Description of Artificial Sequence: Synthetic oligonucleotide"
agcgaaagcagcagccaaaac

SEQ ID NO: 38461 - DNA, 21 bp, Artificial Sequence
  source: /note="Description of Artificial Sequence: Synthetic oligonucleotide"
agcgaaacaacaagcagacac

SEQ ID NO: 38462 - DNA, 21 bp, Artificial Sequence
  source: /note="Description of Artificial Sequence: Synthetic oligonucleotide"
agcgaagtcggaagcgcaaca

SEQ ID NO: 38463 - DNA, 21 bp, Artificial Sequence
  source: /note="Description of Artificial Sequence: Synthetic oligonucleotide"
agcgaagtcaacctcccaagc

SEQ ID NO: 38464 - DNA, 21 bp, Artificial Sequence
  source: /note="Description of Artificial Sequence: Synthetic oligonucleotide"
agcgaagtcagagcaacagca

SEQ ID NO: 38465 - DNA, 21 bp, Artificial Sequence
  source: /note="Description of Artificial Sequence: Synthetic oligonucleotide"
agcgaagtcagcccaagagga

SEQ ID NO: 38466 - DNA, 21 bp, Artificial Sequence
  source: /note="Description of Artificial Sequence: Synthetic oligonucleotide"
agcgaatggaaagtcgaacac

SEQ ID NO: 38467 - DNA, 21 bp, Artificial Sequence
  source: /note="Description of Artificial Sequence: Synthetic oligonucleotide"
agcgaatactaccacagcgca

SEQ ID NO: 38468 - DNA, 21 bp, Artificial Sequence
  source: /note="Description of Artificial Sequence: Synthetic oligonucleotide"
agcttcgcaccagcacacgac

SEQ ID NO: 38469 - DNA, 21 bp, Artificial Sequence
  source: /note="Description of Artificial Sequence: Synthetic oligonucleotide"
agcttcgcaagcttcccagga

SEQ ID NO: 38470 - DNA, 21 bp, Artificial Sequence
  source: /note="Description of Artificial Sequence: Synthetic oligonucleotide"
agcttcgacgacggaggacca

SEQ ID NO: 38471 - DNA, 21 bp, Artificial Sequence
  source: /note="Description of Artificial Sequence: Synthetic oligonucleotide"
agcttcgacggagtcccattc

SEQ ID NO: 38472 - DNA, 21 bp, Artificial Sequence
  source: /note="Description of Artificial Sequence: Synthetic oligonucleotide"
agcttcgaccacacactcgga

SEQ ID NO: 38473 - DNA, 21 bp, Artificial Sequence
  source: /note="Description of Artificial Sequence: Synthetic oligonucleotide"
agcttcgacaaattcgcagaa

SEQ ID NO: 38474 - DNA, 21 bp, Artificial Sequence
  source: /note="Description of Artificial Sequence: Synthetic oligonucleotide"
agcttcgacatggcactcaaa

SEQ ID NO: 38475 - DNA, 21 bp, Artificial Sequence
  source: /note="Description of Artificial Sequence: Synthetic oligonucleotide"
agcttcgacagcaacagaaca

SEQ ID NO: 38476 - DNA, 21 bp, Artificial Sequence
  source: /note="Description of Artificial Sequence: Synthetic oligonucleotide"
agcttcgaaagcaaaatgcac

SEQ ID NO: 38477 - DNA, 21 bp, Artificial Sequence
  source: /note="Description of Artificial Sequence: Synthetic oligonucleotide"
agcttcgaaacaatcggaaga

SEQ ID NO: 38478 - DNA, 21 bp, Artificial Sequence
  source: /note="Description of Artificial Sequence: Synthetic oligonucleotide"
agcttcgaaacatgggcacca

SEQ ID NO: 38479 - DNA, 21 bp, Artificial Sequence
  source: /note="Description of Artificial Sequence: Synthetic oligonucleotide"
agcttcggaatgaaaccaagc

SEQ ID NO: 38480 - DNA, 21 bp, Artificial Sequence
  source: /note="Description of Artificial Sequence: Synthetic oligonucleotide"
agcttcggaaacggaacagtc

SEQ ID NO: 38481 - DNA, 21 bp, Artificial Sequence
  source: /note="Description of Artificial Sequence: Synthetic oligonucleotide"
agcttcggaagcggaccaagc

SEQ ID NO: 38482 - DNA, 21 bp, Artificial Sequence
  source: /note="Description of Artificial Sequence: Synthetic oligonucleotide"
agcttccacgaagcaacaaac

SEQ ID NO: 38483 - DNA, 21 bp, Artificial Sequence
  source: /note="Description of Artificial Sequence: Synthetic oligonucleotide"
agcttcatcacagacgcacca

SEQ ID NO: 38484 - DNA, 21 bp, Artificial Sequence
  source: /note="Description of Artificial Sequence: Synthetic oligonucleotide"
agcttcaaagaccactacgca

SEQ ID NO: 38485 - DNA, 21 bp, Artificial Sequence
  source: /note="Description of Artificial Sequence: Synthetic oligonucleotide"
agcttcaaaagcacaaacctc

SEQ ID NO: 38486 - DNA, 21 bp, Artificial Sequence
  source: /note="Description of Artificial Sequence: Synthetic oligonucleotide"
agcttcaaaacaggaagcgca

SEQ ID NO: 38487 - DNA, 21 bp, Artificial Sequence
  source: /note="Description of Artificial Sequence: Synthetic oligonucleotide"
agcttcatgccacaactcgaa

SEQ ID NO: 38488 - DNA, 21 bp, Artificial Sequence
  source: /note="Description of Artificial Sequence: Synthetic oligonucleotide"
agcttcaacgcaggagcaagc

SEQ ID NO: 38489 - DNA, 21 bp, Artificial Sequence
  source: /note="Description of Artificial Sequence: Synthetic oligonucleotide"
agcttcccagacagaccactc

SEQ ID NO: 38490 - DNA, 21 bp, Artificial Sequence
  source: /note="Description of Artificial Sequence: Synthetic oligonucleotide"
agcttcccaggagaaagagtc

SEQ ID NO: 38491 - DNA, 21 bp, Artificial Sequence
  source: /note="Description of Artificial Sequence: Synthetic oligonucleotide"
agcttccaaggagcaagaaca

SEQ ID NO: 38492 - DNA, 21 bp, Artificial Sequence
  source: /note="Description of Artificial Sequence: Synthetic oligonucleotide"
agcttccaaagccacggagac

SEQ ID NO: 38493 - DNA, 21 bp, Artificial Sequence
  source: /note="Description of Artificial Sequence: Synthetic oligonucleotide"
agcttcagaggaggaatcagc

SEQ ID NO: 38494 - DNA, 21 bp, Artificial Sequence
  source: /note="Description of Artificial Sequence: Synthetic oligonucleotide"
agcttcagacaagcaagctgc

SEQ ID NO: 38495 - DNA, 21 bp, Artificial Sequence
  source: /note="Description of Artificial Sequence: Synthetic oligonucleotide"
agcttcagacaaccacaaagc

SEQ ID NO: 38496 - DNA, 21 bp, Artificial Sequence
  source: /note="Description of Artificial Sequence: Synthetic oligonucleotide"
agcttcagcgacccacaaaac

SEQ ID NO: 38497 - DNA, 21 bp, Artificial Sequence
  source: /note="Description of Artificial Sequence: Synthetic oligonucleotide"
agcttcagcggaccaaaaagc

SEQ ID NO: 38498 - DNA, 21 bp, Artificial Sequence
  source: /note="Description of Artificial Sequence: Synthetic oligonucleotide"
agcttcagcaacccaagccaa

SEQ ID NO: 38499 - DNA, 21 bp, Artificial Sequence
  source: /note="Description of Artificial Sequence: Synthetic oligonucleotide"
agcttcagcagagcaacaagc

SEQ ID NO: 38500 - DNA, 21 bp, Artificial Sequence
  source: /note="Description of Artificial Sequence: Synthetic oligonucleotide"
agcttcagcagcacagcaagc

SEQ ID NO: 38501 - DNA, 21 bp, Artificial Sequence
  source: /note="Description of Artificial Sequence: Synthetic oligonucleotide"
agcttcacaggaagcgtcgca

SEQ ID NO: 38502 - DNA, 21 bp, Artificial Sequence
  source: /note="Description of Artificial Sequence: Synthetic oligonucleotide"
agcttcacaggaagcgtccca

SEQ ID NO: 38503 - DNA, 21 bp, Artificial Sequence
  source: /note="Description of Artificial Sequence: Synthetic oligonucleotide"
agcttcacacaagcactcgaa

SEQ ID NO: 38504 - DNA, 21 bp, Artificial Sequence
  source: /note="Description of Artificial Sequence: Synthetic oligonucleotide"
agcttcacaagacaagaagca

SEQ ID NO: 38505 - DNA, 21 bp, Artificial Sequence
  source: /note="Description of Artificial Sequence: Synthetic oligonucleotide"
agcttcacaacaggaggagtc

SEQ ID NO: 38506 - DNA, 21 bp, Artificial Sequence
  source: /note="Description of Artificial Sequence: Synthetic oligonucleotide"
agcttcacaacacaagcaaca

SEQ ID NO: 38507 - DNA, 21 bp, Artificial Sequence
  source: /note="Description of Artificial Sequence: Synthetic oligonucleotide"
agcttcgtcgacagagcagga

SEQ ID NO: 38508 - DNA, 21 bp, Artificial Sequence
  source: /note="Description of Artificial Sequence: Synthetic oligonucleotide"
agcttcgtccaaacaacacca

SEQ ID NO: 38509 - DNA, 21 bp, Artificial Sequence
  source: /note="Description of Artificial Sequence: Synthetic oligonucleotide"
agcttcgtcagaacaagcaca

SEQ ID NO: 38510 - DNA, 21 bp, Artificial Sequence
  source: /note="Description of Artificial Sequence: Synthetic oligonucleotide"
agcggagcagcaccaacatac

SEQ ID NO: 38511 - DNA, 21 bp, Artificial Sequence
  source: /note="Description of Artificial Sequence: Synthetic oligonucleotide"
agcggagcattccacctcagc

SEQ ID NO: 38512 - DNA, 21 bp, Artificial Sequence
  source: /note="Description of Artificial Sequence: Synthetic oligonucleotide"
agcggagcacaaccaatgttc

SEQ ID NO: 38513 - DNA, 21 bp, Artificial Sequence
  source: /note="Description of Artificial Sequence: Synthetic oligonucleotide"
agcggagcacaagtcccaagc

SEQ ID NO: 38514 - DNA, 21 bp, Artificial Sequence
  source: /note="Description of Artificial Sequence: Synthetic oligonucleotide"
agcggagcaagcgtcatcgca

SEQ ID NO: 38515 - DNA, 21 bp, Artificial Sequence
  source: /note="Description of Artificial Sequence: Synthetic oligonucleotide"
agcggagcaacacacccatac

SEQ ID NO: 38516 - DNA, 21 bp, Artificial Sequence
  source: /note="Description of Artificial Sequence: Synthetic oligonucleotide"
agcggagcagtcagcggactc

SEQ ID NO: 38517 - DNA, 21 bp, Artificial Sequence
  source: /note="Description of Artificial Sequence: Synthetic oligonucleotide"
agcggagcatacagcagcagc

SEQ ID NO: 38518 - DNA, 21 bp, Artificial Sequence
  source: /note="Description of Artificial Sequence: Synthetic oligonucleotide"
agcggatgcagcgaactccca

SEQ ID NO: 38519 - DNA, 21 bp, Artificial Sequence
  source: /note="Description of Artificial Sequence: Synthetic oligonucleotide"
agcggagacccaaaagacatc

SEQ ID NO: 38520 - DNA, 21 bp, Artificial Sequence
  source: /note="Description of Artificial Sequence: Synthetic oligonucleotide"
agcggagaccaaggaagcaga

SEQ ID NO: 38521 - DNA, 21 bp, Artificial Sequence
  source: /note="Description of Artificial Sequence: Synthetic oligonucleotide"
agcggagaagcaaaaagcgga

SEQ ID NO: 38522 - DNA, 21 bp, Artificial Sequence
  source: /note="Description of Artificial Sequence: Synthetic oligonucleotide"
agcggagaactcggaggactc

SEQ ID NO: 38523 - DNA, 21 bp, Artificial Sequence
  source: /note="Description of Artificial Sequence: Synthetic oligonucleotide"
agcggagaactcaacccacca

SEQ ID NO: 38524 - DNA, 21 bp, Artificial Sequence
  source: /note="Description of Artificial Sequence: Synthetic oligonucleotide"
agcggagaactcagatacatc

SEQ ID NO: 38525 - DNA, 21 bp, Artificial Sequence
  source: /note="Description of Artificial Sequence: Synthetic oligonucleotide"
agcggagaaagaacaagcgga

SEQ ID NO: 38526 - DNA, 21 bp, Artificial Sequence
  source: /note="Description of Artificial Sequence: Synthetic oligonucleotide"
agcggattcggagcaaaacaa

SEQ ID NO: 38527 - DNA, 21 bp, Artificial Sequence
  source: /note="Description of Artificial Sequence: Synthetic oligonucleotide"
agcggattcggaccactcaca

SEQ ID NO: 38528 - DNA, 21 bp, Artificial Sequence
  source: /note="Description of Artificial Sequence: Synthetic oligonucleotide"
agcggaggagcactcggatac

SEQ ID NO: 38529 - DNA, 21 bp, Artificial Sequence
  source: /note="Description of Artificial Sequence: Synthetic oligonucleotide"
agcggaggagcaagcacaaca

SEQ ID NO: 38530 - DNA, 21 bp, Artificial Sequence
  source: /note="Description of Artificial Sequence: Synthetic oligonucleotide"
agcggaggaggaacaagcctc

SEQ ID NO: 38531 - DNA, 21 bp, Artificial Sequence
  source: /note="Description of Artificial Sequence: Synthetic oligonucleotide"
agcggaggacacctcacaatc

SEQ ID NO: 38532 - DNA, 21 bp, Artificial Sequence
  source: /note="Description of Artificial Sequence: Synthetic oligonucleotide"
agcggaggactcagagcagca

SEQ ID NO: 38533 - DNA, 21 bp, Artificial Sequence
  source: /note="Description of Artificial Sequence: Synthetic oligonucleotide"
agcggaggacaagaatggaca

SEQ ID NO: 38534 - DNA, 21 bp, Artificial Sequence
  source: /note="Description of Artificial Sequence: Synthetic oligonucleotide"
agcggaggaagcttcacaaca

SEQ ID NO: 38535 - DNA, 21 bp, Artificial Sequence
  source: /note="Description of Artificial Sequence: Synthetic oligonucleotide"
agcggaatcggaagcagacaa

SEQ ID NO: 38536 - DNA, 21 bp, Artificial Sequence
  source: /note="Description of Artificial Sequence: Synthetic oligonucleotide"
agcggaatcctccaaagcagc

SEQ ID NO: 38537 - DNA, 21 bp, Artificial Sequence
  source: /note="Description of Artificial Sequence: Synthetic oligonucleotide"
agcggaatcagcctcagacca

SEQ ID NO: 38538 - DNA, 21 bp, Artificial Sequence
  source: /note="Description of Artificial Sequence: Synthetic oligonucleotide"
agcggaatcagcagaatcgac

SEQ ID NO: 38539 - DNA, 21 bp, Artificial Sequence
  source: /note="Description of Artificial Sequence: Synthetic oligonucleotide"
agcggaaaagcaagcccagga

SEQ ID NO: 38540 - DNA, 21 bp, Artificial Sequence
  source: /note="Description of Artificial Sequence: Synthetic oligonucleotide"
agcggaaaacacacaatgaac

SEQ ID NO: 38541 - DNA, 21 bp, Artificial Sequence
  source: /note="Description of Artificial Sequence: Synthetic oligonucleotide"
agcggaaaactcgtcgtcagc

SEQ ID NO: 38542 - DNA, 21 bp, Artificial Sequence
  source: /note="Description of Artificial Sequence: Synthetic oligonucleotide"
agcggaaaaatgggagtctac

SEQ ID NO: 38543 - DNA, 21 bp, Artificial Sequence
  source: /note="Description of Artificial Sequence: Synthetic oligonucleotide"
agcggaaaaaacccaggatac

SEQ ID NO: 38544 - DNA, 21 bp, Artificial Sequence
  source: /note="Description of Artificial Sequence: Synthetic oligonucleotide"
agcggaaaaccaatgggaaca

SEQ ID NO: 38545 - DNA, 21 bp, Artificial Sequence
  source: /note="Description of Artificial Sequence: Synthetic oligonucleotide"
agcggaaaaagcggattcgaa

SEQ ID NO: 38546 - DNA, 21 bp, Artificial Sequence
  source: /note="Description of Artificial Sequence: Synthetic oligonucleotide"
agcggactcgcagtccaccca

SEQ ID NO: 38547 - DNA, 21 bp, Artificial Sequence
  source: /note="Description of Artificial Sequence: Synthetic oligonucleotide"
agcggactcgaagacgtcgtc

SEQ ID NO: 38548 - DNA, 21 bp, Artificial Sequence
  source: /note="Description of Artificial Sequence: Synthetic oligonucleotide"
agcggactcggaatcagcaca

SEQ ID NO: 38549 - DNA, 21 bp, Artificial Sequence
  source: /note="Description of Artificial Sequence: Synthetic oligonucleotide"
agcggactccacgcactcaca

SEQ ID NO: 38550 - DNA, 21 bp, Artificial Sequence
  source: /note="Description of Artificial Sequence: Synthetic oligonucleotide"
agcggactcatcgcaacagga

SEQ ID NO: 38551 - DNA, 21 bp, Artificial Sequence
  source: /note="Description of Artificial Sequence: Synthetic oligonucleotide"
agcggactcaacccaaaaagc

SEQ ID NO: 38552 - DNA, 21 bp, Artificial Sequence
  source: /note="Description of Artificial Sequence: Synthetic oligonucleotide"
agcggactcaacagaacagtc

SEQ ID NO: 38553 - DNA, 21 bp, Artificial Sequence
  source: /note="Description of Artificial Sequence: Synthetic oligonucleotide"
agcggactcagcgcatacctc

SEQ ID NO: 38554 - DNA, 21 bp, Artificial Sequence
  source: /note="Description of Artificial Sequence: Synthetic oligonucleotide"
agcggaatgggacacgtcgca

SEQ ID NO: 38555 - DNA, 21 bp, Artificial Sequence
  source: /note="Description of Artificial Sequence: Synthetic oligonucleotide"
agcggaatgctcatgagagga

SEQ ID NO: 38556 - DNA, 21 bp, Artificial Sequence
  source: /note="Description of Artificial Sequence: Synthetic oligonucleotide"
agcggaatgacagacagccca

SEQ ID NO: 38557 - DNA, 21 bp, Artificial Sequence
  source: /note="Description of Artificial Sequence: Synthetic oligonucleotide"
agcggaaacggagtcctcctc

SEQ ID NO: 38558 - DNA, 21 bp, Artificial Sequence
  source: /note="Description of Artificial Sequence: Synthetic oligonucleotide"
agcggaaacctcggatacgca

SEQ ID NO: 38559 - DNA, 21 bp, Artificial Sequence
  source: /note="Description of Artificial Sequence: Synthetic oligonucleotide"
agcggaaacatgagcgcagga

SEQ ID NO: 38560 - DNA, 21 bp, Artificial Sequence
  source: /note="Description of Artificial Sequence: Synthetic oligonucleotide"
agcggaaacccaagccaagca

SEQ ID NO: 38561 - DNA, 21 bp, Artificial Sequence
  source: /note="Description of Artificial Sequence: Synthetic oligonucleotide"
agcggaaacacatacagcaga

SEQ ID NO: 38562 - DNA, 21 bp, Artificial Sequence
  source: /note="Description of Artificial Sequence: Synthetic oligonucleotide"
agcggaccagacatcttcctc

SEQ ID NO: 38563 - DNA, 21 bp, Artificial Sequence
  source: /note="Description of Artificial Sequence: Synthetic oligonucleotide"
agcggaccacacggaggacaa

SEQ ID NO: 38564 - DNA, 21 bp, Artificial Sequence
  source: /note="Description of Artificial Sequence: Synthetic oligonucleotide"
agcggaccactcaacagccca

SEQ ID NO: 38565 - DNA, 21 bp, Artificial Sequence
  source: /note="Description of Artificial Sequence: Synthetic oligonucleotide"
agcggaccaagactcggacca

SEQ ID NO: 38566 - DNA, 21 bp, Artificial Sequence
  source: /note="Description of Artificial Sequence: Synthetic oligonucleotide"
agcggaccaagcgtcctcaga

SEQ ID NO: 38567 - DNA, 21 bp, Artificial Sequence
  source: /note="Description of Artificial Sequence: Synthetic oligonucleotide"
agcggaccaacacacgcaatg

SEQ ID NO: 38568 - DNA, 21 bp, Artificial Sequence
  source: /note="Description of Artificial Sequence: Synthetic oligonucleotide"
agcggaccagtcggaagaaca

SEQ ID NO: 38569 - DNA, 21 bp, Artificial Sequence
  source: /note="Description of Artificial Sequence: Synthetic oligonucleotide"
agcggaccatacaaactcgaa

SEQ ID NO: 38570 - DNA, 21 bp, Artificial Sequence
  source: /note="Description of Artificial Sequence: Synthetic oligonucleotide"
agcggaccatacccaatcaaa

SEQ ID NO: 38571 - DNA, 21 bp, Artificial Sequence
  source: /note="Description of Artificial Sequence: Synthetic oligonucleotide"
agcggacaagcaagcctcaca

SEQ ID NO: 38572 - DNA, 21 bp, Artificial Sequence
  source: /note="Description of Artificial Sequence: Synthetic oligonucleotide"
agcggacaaagcatcagccca

SEQ ID NO: 38573 - DNA, 21 bp, Artificial Sequence
  source: /note="Description of Artificial Sequence: Synthetic oligonucleotide"
agcggacaagtcccaagcgca

SEQ ID NO: 38574 - DNA, 21 bp, Artificial Sequence
  source: /note="Description of Artificial Sequence: Synthetic oligonucleotide"
agcggacaatacccaagcatc

SEQ ID NO: 38575 - DNA, 21 bp, Artificial Sequence
  source: /note="Description of Artificial Sequence: Synthetic oligonucleotide"
agcggaagaggaccaccacca

SEQ ID NO: 38576 - DNA, 21 bp, Artificial Sequence
  source: /note="Description of Artificial Sequence: Synthetic oligonucleotide"
agcggaagacacagcgacgac

SEQ ID NO: 38577 - DNA, 21 bp, Artificial Sequence
  source: /note="Description of Artificial Sequence: Synthetic oligonucleotide"
agcggaagaccaagcccagca

SEQ ID NO: 38578 - DNA, 21 bp, Artificial Sequence
  source: /note="Description of Artificial Sequence: Synthetic oligonucleotide"
agcggaagacaaccaacagtc

SEQ ID NO: 38579 - DNA, 21 bp, Artificial Sequence
  source: /note="Description of Artificial Sequence: Synthetic oligonucleotide"
agcggaagaacaatcatcaca

SEQ ID NO: 38580 - DNA, 21 bp, Artificial Sequence
  source: /note="Description of Artificial Sequence: Synthetic oligonucleotide"
agcggaagagtcacaaacagc

SEQ ID NO: 38581 - DNA, 21 bp, Artificial Sequence
  source: /note="Description of Artificial Sequence: Synthetic oligonucleotide"
agcggaagcgacccaagaaca

SEQ ID NO: 38582 - DNA, 21 bp, Artificial Sequence
  source: /note="Description of Artificial Sequence: Synthetic oligonucleotide"
agcggaagcggagtcccacaa

SEQ ID NO: 38583 - DNA, 21 bp, Artificial Sequence
  source: /note="Description of Artificial Sequence: Synthetic oligonucleotide"
agcggaagcaaagacagccac

SEQ ID NO: 38584 - DNA, 21 bp, Artificial Sequence
  source: /note="Description of Artificial Sequence: Synthetic oligonucleotide"
agcggaagcaaaggagcattc

SEQ ID NO: 38585 - DNA, 21 bp, Artificial Sequence
  source: /note="Description of Artificial Sequence: Synthetic oligonucleotide"
agcggaagcatgagccaagtc

SEQ ID NO: 38586 - DNA, 21 bp, Artificial Sequence
  source: /note="Description of Artificial Sequence: Synthetic oligonucleotide"
agcggaagcaacatgctcaaa

SEQ ID NO: 38587 - DNA, 21 bp, Artificial Sequence
  source: /note="Description of Artificial Sequence: Synthetic oligonucleotide"
agcggaagcccaagaatcagc

SEQ ID NO: 38588 - DNA, 21 bp, Artificial Sequence
  source: /note="Description of Artificial Sequence: Synthetic oligonucleotide"
agcggaagccaaggaacaaga

SEQ ID NO: 38589 - DNA, 21 bp, Artificial Sequence
  source: /note="Description of Artificial Sequence: Synthetic oligonucleotide"
agcggaagcagaatcatggaa

SEQ ID NO: 38590 - DNA, 21 bp, Artificial Sequence
  source: /note="Description of Artificial Sequence: Synthetic oligonucleotide"
agcggaagcagaaacctcgga

SEQ ID NO: 38591 - DNA, 21 bp, Artificial Sequence
  source: /note="Description of Artificial Sequence: Synthetic oligonucleotide"
agcggaagcagaaacatggtc

SEQ ID NO: 38592 - DNA, 21 bp, Artificial Sequence
  source: /note="Description of Artificial Sequence: Synthetic oligonucleotide"
agcggaagcagaagcatgctc

SEQ ID NO: 38593 - DNA, 21 bp, Artificial Sequence
  source: /note="Description of Artificial Sequence: Synthetic oligonucleotide"
agcggaagcagagtcgcacca

SEQ ID NO: 38594 - DNA, 21 bp, Artificial Sequence
  source: /note="Description of Artificial Sequence: Synthetic oligonucleotide"
agcggaagcagcgcaagcaga

SEQ ID NO: 38595 - DNA, 21 bp, Artificial Sequence
  source: /note="Description of Artificial Sequence: Synthetic oligonucleotide"
agcggaagcagcggaagcgca

SEQ ID NO: 38596 - DNA, 21 bp, Artificial Sequence
  source: /note="Description of Artificial Sequence: Synthetic oligonucleotide"
agcggaagcagcaaaagcatg

SEQ ID NO: 38597 - DNA, 21 bp, Artificial Sequence
  source: /note="Description of Artificial Sequence: Synthetic oligonucleotide"
agcggaagcagcacatgcatc

SEQ ID NO: 38598 - DNA, 21 bp, Artificial Sequence
  source: /note="Description of Artificial Sequence: Synthetic oligonucleotide"
agcggaagcagcacaatcaac

SEQ ID NO: 38599 - DNA, 21 bp, Artificial Sequence
  source: /note="Description of Artificial Sequence: Synthetic oligonucleotide"
agcggaagcagcacaccacaa

SEQ ID NO: 38600 - DNA, 21 bp, Artificial Sequence
  source: /note="Description of Artificial Sequence: Synthetic oligonucleotide"
agcggaagcgtctggccagac

SEQ ID NO: 38601 - DNA, 21 bp, Artificial Sequence
  source: /note="Description of Artificial Sequence: Synthetic oligonucleotide"
agcggaagctacccaagagac

SEQ ID NO: 38602 - DNA, 21 bp, Artificial Sequence
  source: /note="Description of Artificial Sequence: Synthetic oligonucleotide"
agcggaacagcactcacactc

SEQ ID NO: 38603 - DNA, 21 bp, Artificial Sequence
  source: /note="Description of Artificial Sequence: Synthetic oligonucleotide"
agcggaacagaccacctcctc

SEQ ID NO: 38604 - DNA, 21 bp, Artificial Sequence
  source: /note="Description of Artificial Sequence: Synthetic oligonucleotide"
agcggaacaggacaagacgga

SEQ ID NO: 38605 - DNA, 21 bp, Artificial Sequence
  source: /note="Description of Artificial Sequence: Synthetic oligonucleotide"
agcggaacaggaagaggaaca

SEQ ID NO: 38606 - DNA, 21 bp, Artificial Sequence
  source: /note="Description of Artificial Sequence: Synthetic oligonucleotide"
agcggaacactcacacaaaaa

SEQ ID NO: 38607 - DNA, 21 bp, Artificial Sequence
  source: /note="Description of Artificial Sequence: Synthetic oligonucleotide"
agcggaacaccaatgagcaga

SEQ ID NO: 38608 - DNA, 21 bp, Artificial Sequence
  source: /note="Description of Artificial Sequence: Synthetic oligonucleotide"
agcggaacaagcgtcttcgca

SEQ ID NO: 38609 - DNA, 21 bp, Artificial Sequence
  source: /note="Description of Artificial Sequence: Synthetic oligonucleotide"
agcggaacaacagcatgggca

SEQ ID NO: 38610 - DNA, 21 bp, Artificial Sequence
  source: /note="Description of Artificial Sequence: Synthetic oligonucleotide"
agcggaacaacaggatacaga

SEQ ID NO: 38611 - DNA, 21 bp, Artificial Sequence
  source: /note="Description of Artificial Sequence: Synthetic oligonucleotide"
agcggaacagtctacagagtc

SEQ ID NO: 38612 - DNA, 21 bp, Artificial Sequence
  source: /note="Description of Artificial Sequence: Synthetic oligonucleotide"
agcggagtcggaatgatcagc

SEQ ID NO: 38613 - DNA, 21 bp, Artificial Sequence
  source: /note="Description of Artificial Sequence: Synthetic oligonucleotide"
agcggagtccacccattccca

SEQ ID NO: 38614 - DNA, 21 bp, Artificial Sequence
  source: /note="Description of Artificial Sequence: Synthetic oligonucleotide"
agcggagtcatcaaaacaagc

SEQ ID NO: 38615 - DNA, 21 bp, Artificial Sequence
  source: /note="Description of Artificial Sequence: Synthetic oligonucleotide"
agcggagtcaacctcagcagc

SEQ ID NO: 38616 - DNA, 21 bp, Artificial Sequence
  source: /note="Description of Artificial Sequence: Synthetic oligonucleotide"
agcggagtccaaagcggacca

SEQ ID NO: 38617 - DNA, 21 bp, Artificial Sequence
  source: /note="Description of Artificial Sequence: Synthetic oligonucleotide"
agcggagtcagacaagtcgca

SEQ ID NO: 38618 - DNA, 21 bp, Artificial Sequence
  source: /note="Description of Artificial Sequence: Synthetic oligonucleotide"
agcggagtcagcatgctccca

SEQ ID NO: 38619 - DNA, 21 bp, Artificial Sequence
  source: /note="Description of Artificial Sequence: Synthetic oligonucleotide"
agcggagtcagcagatacgca

SEQ ID NO: 38620 - DNA, 21 bp, Artificial Sequence
  source: /note="Description of Artificial Sequence: Synthetic oligonucleotide"
agcggagtcagctacgtcgaa

SEQ ID NO: 38621 - DNA, 21 bp, Artificial Sequence
  source: /note="Description of Artificial Sequence: Synthetic oligonucleotide"
agcggatacccaaacctcgac

SEQ ID NO: 38622 - DNA, 21 bp, Artificial Sequence
  source: /note="Description of Artificial Sequence: Synthetic oligonucleotide"
agccacgcagcacaactccca

SEQ ID NO: 38623 - DNA, 21 bp, Artificial Sequence
  source: /note="Description of Artificial Sequence: Synthetic oligonucleotide"
agccacgcaaacctccacgca

SEQ ID NO: 38624 - DNA, 21 bp, Artificial Sequence
  source: /note="Description of Artificial Sequence: Synthetic oligonucleotide"
agccacgcaaacacaagcagc

SEQ ID NO: 38625 - DNA, 21 bp, Artificial Sequence
  source: /note="Description of Artificial Sequence: Synthetic oligonucleotide"
agccacgcaagcaactaccca

SEQ ID NO: 38626 - DNA, 21 bp, Artificial Sequence
  source: /note="Description of Artificial Sequence: Synthetic oligonucleotide"
agccacgcaagcgtcagaagc

SEQ ID NO: 38627 - DNA, 21 bp, Artificial Sequence
  source: /note="Description of Artificial Sequence: Synthetic oligonucleotide"
agccacgcaacaacaccaagc

SEQ ID NO: 38628 - DNA, 21 bp, Artificial Sequence
  source: /note="Description of Artificial Sequence: Synthetic oligonucleotide"
agccacgcagtcagaatggga

SEQ ID NO: 38629 - DNA, 21 bp, Artificial Sequence
  source: /note="Description of Artificial Sequence: Synthetic oligonucleotide"
agccacgacaacagaggagtc

SEQ ID NO: 38630 - DNA, 21 bp, Artificial Sequence
  source: /note="Description of Artificial Sequence: Synthetic oligonucleotide"
agccacgaaaacggaagcaca

SEQ ID NO: 38631 - DNA, 21 bp, Artificial Sequence
  source: /note="Description of Artificial Sequence: Synthetic oligonucleotide"
agccacgaaccacacacaaga

SEQ ID NO: 38632 - DNA, 21 bp, Artificial Sequence
  source: /note="Description of Artificial Sequence: Synthetic oligonucleotide"
agccacgaaagcctcggaatg

SEQ ID NO: 38633 - DNA, 21 bp, Artificial Sequence
  source: /note="Description of Artificial Sequence: Synthetic oligonucleotide"
agccacttcccaatggcacca

SEQ ID NO: 38634 - DNA, 21 bp, Artificial Sequence
  source: /note="Description of Artificial Sequence: Synthetic oligonucleotide"
agccacttcagcgcagcagaa

SEQ ID NO: 38635 - DNA, 21 bp, Artificial Sequence
  source: /note="Description of Artificial Sequence: Synthetic oligonucleotide"
agccacggaccaccaagaagc

SEQ ID NO: 38636 - DNA, 21 bp, Artificial Sequence
  source: /note="Description of Artificial Sequence: Synthetic oligonucleotide"
agccacggaccatacccatac

SEQ ID NO: 38637 - DNA, 21 bp, Artificial Sequence
  source: /note="Description of Artificial Sequence: Synthetic oligonucleotide"
agccacggaagcgcagtcaac

SEQ ID NO: 38638 - DNA, 21 bp, Artificial Sequence
  source: /note="Description of Artificial Sequence: Synthetic oligonucleotide"
agccacggaagcttcccaagc

SEQ ID NO: 38639 - DNA, 21 bp, Artificial Sequence
  source: /note="Description of Artificial Sequence: Synthetic oligonucleotide"
agccacggaacaaaaagcaca

SEQ ID NO: 38640 - DNA, 21 bp, Artificial Sequence
  source: /note="Description of Artificial Sequence: Synthetic oligonucleotide"
agccaccacggaagcatcatc

SEQ ID NO: 38641 - DNA, 21 bp, Artificial Sequence
  source: /note="Description of Artificial Sequence: Synthetic oligonucleotide"
agccacatccaactcgcacca

SEQ ID NO: 38642 - DNA, 21 bp, Artificial Sequence
  source: /note="Description of Artificial Sequence: Synthetic oligonucleotide"
agccacaaaagaatggtcgac

SEQ ID NO: 38643 - DNA, 21 bp, Artificial Sequence
  source: /note="Description of Artificial Sequence: Synthetic oligonucleotide"
agccacaaaagcccaacacca

SEQ ID NO: 38644 - DNA, 21 bp, Artificial Sequence
  source: /note="Description of Artificial Sequence: Synthetic oligonucleotide"
agccacctcgaaatcgacatg

SEQ ID NO: 38645 - DNA, 21 bp, Artificial Sequence
  source: /note="Description of Artificial Sequence: Synthetic oligonucleotide"
agccacctcaacctcagacca

SEQ ID NO: 38646 - DNA, 21 bp, Artificial Sequence
  source: /note="Description of Artificial Sequence: Synthetic oligonucleotide"
agccacctcccagtcagcatg

SEQ ID NO: 38647 - DNA, 21 bp, Artificial Sequence
  source: /note="Description of Artificial Sequence: Synthetic oligonucleotide"
agccacctccaaaacagaatc

SEQ ID NO: 38648 - DNA, 21 bp, Artificial Sequence
  source: /note="Description of Artificial Sequence: Synthetic oligonucleotide"
agccacatgacaggaagcaca

SEQ ID NO: 38649 - DNA, 21 bp, Artificial Sequence
  source: /note="Description of Artificial Sequence: Synthetic oligonucleotide"
agccacaacgcattcccaaca

SEQ ID NO: 38650 - DNA, 21 bp, Artificial Sequence
  source: /note="Description of Artificial Sequence: Synthetic oligonucleotide"
agccacaacgcactcatggac

SEQ ID NO: 38651 - DNA, 21 bp, Artificial Sequence
  source: /note="Description of Artificial Sequence: Synthetic oligonucleotide"
agccacaacatcccagcagga

SEQ ID NO: 38652 - DNA, 21 bp, Artificial Sequence
  source: /note="Description of Artificial Sequence: Synthetic oligonucleotide"
agccacaacaaactcagcagc

SEQ ID NO: 38653 - DNA, 21 bp, Artificial Sequence
  source: /note="Description of Artificial Sequence: Synthetic oligonucleotide"
agccacccagcaatcagcgca

SEQ ID NO: 38654 - DNA, 21 bp, Artificial Sequence
  source: /note="Description of Artificial Sequence: Synthetic oligonucleotide"
agccacccagcactcccacca

SEQ ID NO: 38655 - DNA, 21 bp, Artificial Sequence
  source: /note="Description of Artificial Sequence: Synthetic oligonucleotide"
agccacccagacctcagccca

SEQ ID NO: 38656 - DNA, 21 bp, Artificial Sequence
  source: /note="Description of Artificial Sequence: Synthetic oligonucleotide"
agccacccaatgctcccaaca

SEQ ID NO: 38657 - DNA, 21 bp, Artificial Sequence
  source: /note="Description of Artificial Sequence: Synthetic oligonucleotide"
agccacccaatgatgccagca

SEQ ID NO: 38658 - DNA, 21 bp, Artificial Sequence
  source: /note="Description of Artificial Sequence: Synthetic oligonucleotide"
agccacccaccactcagactc

SEQ ID NO: 38659 - DNA, 21 bp, Artificial Sequence
  source: /note="Description of Artificial Sequence: Synthetic oligonucleotide"
agccacccaagcagcgaacca

SEQ ID NO: 38660 - DNA, 21 bp, Artificial Sequence
  source: /note="Description of Artificial Sequence: Synthetic oligonucleotide"
agccaccaagcaagagcacca

SEQ ID NO: 38661 - DNA, 21 bp, Artificial Sequence
  source: /note="Description of Artificial Sequence: Synthetic oligonucleotide"
agccacagaggagacgaacac

SEQ ID NO: 38662 - DNA, 21 bp, Artificial Sequence
  source: /note="Description of Artificial Sequence: Synthetic oligonucleotide"
agccacagaccaagcacactc

SEQ ID NO: 38663 - DNA, 21 bp, Artificial Sequence
  source: /note="Description of Artificial Sequence: Synthetic oligonucleotide"
agccacagaccaacaagcagc

SEQ ID NO: 38664 - DNA, 21 bp, Artificial Sequence
  source: /note="Description of Artificial Sequence: Synthetic oligonucleotide"
agccacagcgcactcatggga

SEQ ID NO: 38665 - DNA, 21 bp, Artificial Sequence
  source: /note="Description of Artificial Sequence: Synthetic oligonucleotide"
agccacagcgcaatgcaacac

SEQ ID NO: 38666 - DNA, 21 bp, Artificial Sequence
  source: /note="Description of Artificial Sequence: Synthetic oligonucleotide"
agccacagccacagcgacgca

SEQ ID NO: 38667 - DNA, 21 bp, Artificial Sequence
  source: /note="Description of Artificial Sequence: Synthetic oligonucleotide"
agccacagcctcggaggaaac

SEQ ID NO: 38668 - DNA, 21 bp, Artificial Sequence
  source: /note="Description of Artificial Sequence: Synthetic oligonucleotide"
agccacagcccagacatcaaa

SEQ ID NO: 38669 - DNA, 21 bp, Artificial Sequence
  source: /note="Description of Artificial Sequence: Synthetic oligonucleotide"
agccacagcccactcctccca

SEQ ID NO: 38670 - DNA, 21 bp, Artificial Sequence
  source: /note="Description of Artificial Sequence: Synthetic oligonucleotide"
agccacagcagcatcatggtc

SEQ ID NO: 38671 - DNA, 21 bp, Artificial Sequence
  source: /note="Description of Artificial Sequence: Synthetic oligonucleotide"
agccacagcagcagactcatg

SEQ ID NO: 38672 - DNA, 21 bp, Artificial Sequence
  source: /note="Description of Artificial Sequence: Synthetic oligonucleotide"
agccacacacacggaaaccca

SEQ ID NO: 38673 - DNA, 21 bp, Artificial Sequence
  source: /note="Description of Artificial Sequence: Synthetic oligonucleotide"
agccacacaaaagtcagccac

SEQ ID NO: 38674 - DNA, 21 bp, Artificial Sequence
  source: /note="Description of Artificial Sequence: Synthetic oligonucleotide"
agccacacaccaagagcaagc

SEQ ID NO: 38675 - DNA, 21 bp, Artificial Sequence
  source: /note="Description of Artificial Sequence: Synthetic oligonucleotide"
agccacacaagaccagacgca

SEQ ID NO: 38676 - DNA, 21 bp, Artificial Sequence
  source: /note="Description of Artificial Sequence: Synthetic oligonucleotide"
agccacacaagcctcccaaga

SEQ ID NO: 38677 - DNA, 21 bp, Artificial Sequence
  source: /note="Description of Artificial Sequence: Synthetic oligonucleotide"
agccacacaagcctcgtcatc

SEQ ID NO: 38678 - DNA, 21 bp, Artificial Sequence
  source: /note="Description of Artificial Sequence: Synthetic oligonucleotide"
agccacgtcgcaggacacgca

SEQ ID NO: 38679 - DNA, 21 bp, Artificial Sequence
  source: /note="Description of Artificial Sequence: Synthetic oligonucleotide"
agccacgtcgcaagcaaagga

SEQ ID NO: 38680 - DNA, 21 bp, Artificial Sequence
  source: /note="Description of Artificial Sequence: Synthetic oligonucleotide"
agccacgtcgtcaacagcctc

SEQ ID NO: 38681 - DNA, 21 bp, Artificial Sequence
  source: /note="Description of Artificial Sequence: Synthetic oligonucleotide"
agccacgtctacccaggacca

SEQ ID NO: 38682 - DNA, 21 bp, Artificial Sequence
  source: /note="Description of Artificial Sequence: Synthetic oligonucleotide"
agcatcgcagcacaccaagga

SEQ ID NO: 38683 - DNA, 21 bp, Artificial Sequence
  source: /note="Description of Artificial Sequence: Synthetic oligonucleotide"
agcatcgcacaagtcggagca

SEQ ID NO: 38684 - DNA, 21 bp, Artificial Sequence
  source: /note="Description of Artificial Sequence: Synthetic oligonucleotide"
agcatcgcaagagcagtcaca

SEQ ID NO: 38685 - DNA, 21 bp, Artificial Sequence
  source: /note="Description of Artificial Sequence: Synthetic oligonucleotide"
agcatcgacagcatcgcagtc

SEQ ID NO: 38686 - DNA, 21 bp, Artificial Sequence
  source: /note="Description of Artificial Sequence: Synthetic oligonucleotide"
agcatcgacagcagcagcctc

SEQ ID NO: 38687 - DNA, 21 bp, Artificial Sequence
  source: /note="Description of Artificial Sequence: Synthetic oligonucleotide"
agcatcgacagcacatacatg

SEQ ID NO: 38688 - DNA, 21 bp, Artificial Sequence
  source: /note="Description of Artificial Sequence: Synthetic oligonucleotide"
agcatcgaaagagaactcaga

SEQ ID NO: 38689 - DNA, 21 bp, Artificial Sequence
  source: /note="Description of Artificial Sequence: Synthetic oligonucleotide"
agcatcggaggagtcctctac

SEQ ID NO: 38690 - DNA, 21 bp, Artificial Sequence
  source: /note="Description of Artificial Sequence: Synthetic oligonucleotide"
agcatcggaaacttcccagac

SEQ ID NO: 38691 - DNA, 21 bp, Artificial Sequence
  source: /note="Description of Artificial Sequence: Synthetic oligonucleotide"
agcatcggaagcgcaccagca

SEQ ID NO: 38692 - DNA, 21 bp, Artificial Sequence
  source: /note="Description of Artificial Sequence: Synthetic oligonucleotide"
agcatcggaacagtcgtcgga

SEQ ID NO: 38693 - DNA, 21 bp, Artificial Sequence
  source: /note="Description of Artificial Sequence: Synthetic oligonucleotide"
agcatcggagtccacccagga

SEQ ID NO: 38694 - DNA, 21 bp, Artificial Sequence
  source: /note="Description of Artificial Sequence: Synthetic oligonucleotide"
agcatccacctcgtcacaagc

SEQ ID NO: 38695 - DNA, 21 bp, Artificial Sequence
  source: /note="Description of Artificial Sequence: Synthetic oligonucleotide"
agcatccacaacggaccacaa

SEQ ID NO: 38696 - DNA, 21 bp, Artificial Sequence
  source: /note="Description of Artificial Sequence: Synthetic oligonucleotide"
agcatcatcgaaagcgtcgca

SEQ ID NO: 38697 - DNA, 21 bp, Artificial Sequence
  source: /note="Description of Artificial Sequence: Synthetic oligonucleotide"
agcatcatccaagcaaaacca

SEQ ID NO: 38698 - DNA, 21 bp, Artificial Sequence
  source: /note="Description of Artificial Sequence: Synthetic oligonucleotide"
agcatcatcagcgaaagaaga

SEQ ID NO: 38699 - DNA, 21 bp, Artificial Sequence
  source: /note="Description of Artificial Sequence: Synthetic oligonucleotide"
agcatcaaagtcaacccacca

SEQ ID NO: 38700 - DNA, 21 bp, Artificial Sequence
  source: /note="Description of Artificial Sequence: Synthetic oligonucleotide"
agcatcctcggagcaatccca

SEQ ID NO: 38701 - DNA, 21 bp, Artificial Sequence
  source: /note="Description of Artificial Sequence: Synthetic oligonucleotide"
agcatcctctacggaatgcca

SEQ ID NO: 38702 - DNA, 21 bp, Artificial Sequence
  source: /note="Description of Artificial Sequence: Synthetic oligonucleotide"
agcatcatgaacacaggacca

SEQ ID NO: 38703 - DNA, 21 bp, Artificial Sequence
  source: /note="Description of Artificial Sequence: Synthetic oligonucleotide"
agcatcatgagaacagactgc

SEQ ID NO: 38704 - DNA, 21 bp, Artificial Sequence
  source: /note="Description of Artificial Sequence: Synthetic oligonucleotide"
agcatcaacgaagaaccacca

SEQ ID NO: 38705 - DNA, 21 bp, Artificial Sequence
  source: /note="Description of Artificial Sequence: Synthetic oligonucleotide"
agcatcaacgtcacacacgga

SEQ ID NO: 38706 - DNA, 21 bp, Artificial Sequence
  source: /note="Description of Artificial Sequence: Synthetic oligonucleotide"
agcatcccaatgagcggaaga

SEQ ID NO: 38707 - DNA, 21 bp, Artificial Sequence
  source: /note="Description of Artificial Sequence: Synthetic oligonucleotide"
agcatcccaaacctccaagca

SEQ ID NO: 38708 - DNA, 21 bp, Artificial Sequence
  source: /note="Description of Artificial Sequence: Synthetic oligonucleotide"
agcatcccaaacctctacgac

SEQ ID NO: 38709 - DNA, 21 bp, Artificial Sequence
  source: /note="Description of Artificial Sequence: Synthetic oligonucleotide"
agcatcccaaacagcagacaa

SEQ ID NO: 38710 - DNA, 21 bp, Artificial Sequence
  source: /note="Description of Artificial Sequence: Synthetic oligonucleotide"
agcatccaaaaacacctccca

SEQ ID NO: 38711 - DNA, 21 bp, Artificial Sequence
  source: /note="Description of Artificial Sequence: Synthetic oligonucleotide"
agcatccaatggaaagacagc

SEQ ID NO: 38712 - DNA, 21 bp, Artificial Sequence
  source: /note="Description of Artificial Sequence: Synthetic oligonucleotide"
agcatcagcctcccataccca

SEQ ID NO: 38713 - DNA, 21 bp, Artificial Sequence
  source: /note="Description of Artificial Sequence: Synthetic oligonucleotide"
agcatcagcccaagcccagga

SEQ ID NO: 38714 - DNA, 21 bp, Artificial Sequence
  source: /note="Description of Artificial Sequence: Synthetic oligonucleotide"
agcatcagcagccaagacctc

SEQ ID NO: 38715 - DNA, 21 bp, Artificial Sequence
  source: /note="Description of Artificial Sequence: Synthetic oligonucleotide"
agcatcagcagcagcagcgga

SEQ ID NO: 38716 - DNA, 21 bp, Artificial Sequence
  source: /note="Description of Artificial Sequence: Synthetic oligonucleotide"
agcatcagcgtcatgaaacaa

SEQ ID NO: 38717 - DNA, 21 bp, Artificial Sequence
  source: /note="Description of Artificial Sequence: Synthetic oligonucleotide"
agcatcacaccattcaacgaa

SEQ ID NO: 38718 - DNA, 21 bp, Artificial Sequence
  source: /note="Description of Artificial Sequence: Synthetic oligonucleotide"
agcatcacaagcgaaaaaatc

SEQ ID NO: 38719 - DNA, 21 bp, Artificial Sequence
  source: /note="Description of Artificial Sequence: Synthetic oligonucleotide"
agcatcacaacaggaagagga

SEQ ID NO: 38720 - DNA, 21 bp, Artificial Sequence
  source: /note="Description of Artificial Sequence: Synthetic oligonucleotide"
agcatcacaacaagaacagac

SEQ ID NO: 38721 - DNA, 21 bp, Artificial Sequence
  source: /note="Description of Artificial Sequence: Synthetic oligonucleotide"
agcatcgtccacccagacagc

SEQ ID NO: 38722 - DNA, 21 bp, Artificial Sequence
  source: /note="Description of Artificial Sequence: Synthetic oligonucleotide"
agcatcgtcctcaaaggaagc

SEQ ID NO: 38723 - DNA, 21 bp, Artificial Sequence
  source: /note="Description of Artificial Sequence: Synthetic oligonucleotide"
agcatcgtcagcagagtcgaa

SEQ ID NO: 38724 - DNA, 21 bp, Artificial Sequence
  source: /note="Description of Artificial Sequence: Synthetic oligonucleotide"
agcatcgtcacagtcagcgga

SEQ ID NO: 38725 - DNA, 21 bp, Artificial Sequence
  source: /note="Description of Artificial Sequence: Synthetic oligonucleotide"
agcaaagcacacgaaaaccca

SEQ ID NO: 38726 - DNA, 21 bp, Artificial Sequence
  source: /note="Description of Artificial Sequence: Synthetic oligonucleotide"
agcaaagcaccatacagcgca

SEQ ID NO: 38727 - DNA, 21 bp, Artificial Sequence
  source: /note="Description of Artificial Sequence: Synthetic oligonucleotide"
agcaaagcaagcctcaaccca

SEQ ID NO: 38728 - DNA, 21 bp, Artificial Sequence
  source: /note="Description of Artificial Sequence: Synthetic oligonucleotide"
agcaaagcatacacaccactc

SEQ ID NO: 38729 - DNA, 21 bp, Artificial Sequence
  source: /note="Description of Artificial Sequence: Synthetic oligonucleotide"
agcaaagacggaagcctcaac

SEQ ID NO: 38730 - DNA, 21 bp, Artificial Sequence
  source: /note="Description of Artificial Sequence: Synthetic oligonucleotide"
agcaaagaccacttcccagca

SEQ ID NO: 38731 - DNA, 21 bp, Artificial Sequence
  source: /note="Description of Artificial Sequence: Synthetic oligonucleotide"
agcaaagacatcctcagaagc

SEQ ID NO: 38732 - DNA, 21 bp, Artificial Sequence
  source: /note="Description of Artificial Sequence: Synthetic oligonucleotide"
agcaaagacatgctcgaaaca

SEQ ID NO: 38733 - DNA, 21 bp, Artificial Sequence
  source: /note="Description of Artificial Sequence: Synthetic oligonucleotide"
agcaaagacacactcagaaac

SEQ ID NO: 38734 - DNA, 21 bp, Artificial Sequence
  source: /note="Description of Artificial Sequence: Synthetic oligonucleotide"
agcaaagacacaccactcgca

SEQ ID NO: 38735 - DNA, 21 bp, Artificial Sequence
  source: /note="Description of Artificial Sequence: Synthetic oligonucleotide"
agcaaagaaatctacacacaa

SEQ ID NO: 38736 - DNA, 21 bp, Artificial Sequence
  source: /note="Description of Artificial Sequence: Synthetic oligonucleotide"
agcaaagaaaactacccacac

SEQ ID NO: 38737 - DNA, 21 bp, Artificial Sequence
  source: /note="Description of Artificial Sequence: Synthetic oligonucleotide"
agcaaagaaagattcccatac

SEQ ID NO: 38738 - DNA, 21 bp, Artificial Sequence
  source: /note="Description of Artificial Sequence: Synthetic oligonucleotide"
agcaaagaatacccagaatac

SEQ ID NO: 38739 - DNA, 21 bp, Artificial Sequence
  source: /note="Description of Artificial Sequence: Synthetic oligonucleotide"
agcaaattcaacggacacctc

SEQ ID NO: 38740 - DNA, 21 bp, Artificial Sequence
  source: /note="Description of Artificial Sequence: Synthetic oligonucleotide"
agcaaacacgaagtctacctc

SEQ ID NO: 38741 - DNA, 21 bp, Artificial Sequence
  source: /note="Description of Artificial Sequence: Synthetic oligonucleotide"
agcaaacacacagcattcgtc

SEQ ID NO: 38742 - DNA, 21 bp, Artificial Sequence
  source: /note="Description of Artificial Sequence: Synthetic oligonucleotide"
agcaaaatcgacctctacaca

SEQ ID NO: 38743 - DNA, 21 bp, Artificial Sequence
  source: /note="Description of Artificial Sequence: Synthetic oligonucleotide"
agcaaaatcgacagagacgac

SEQ ID NO: 38744 - DNA, 21 bp, Artificial Sequence
  source: /note="Description of Artificial Sequence: Synthetic oligonucleotide"
agcaaaatcccacacgaagtc

SEQ ID NO: 38745 - DNA, 21 bp, Artificial Sequence
  source: /note="Description of Artificial Sequence: Synthetic oligonucleotide"
agcaaactcgacgacggaaga

SEQ ID NO: 38746 - DNA, 21 bp, Artificial Sequence
  source: /note="Description of Artificial Sequence: Synthetic oligonucleotide"
agcaaactcggaagccacctc

SEQ ID NO: 38747 - DNA, 21 bp, Artificial Sequence
  source: /note="Description of Artificial Sequence: Synthetic oligonucleotide"
agcaaactcccaccactccac

SEQ ID NO: 38748 - DNA, 21 bp, Artificial Sequence
  source: /note="Description of Artificial Sequence: Synthetic oligonucleotide"
agcaaactcccagtcgcactc

SEQ ID NO: 38749 - DNA, 21 bp, Artificial Sequence
  source: /note="Description of Artificial Sequence: Synthetic oligonucleotide"
agcaaactcacaacagaacca

SEQ ID NO: 38750 - DNA, 21 bp, Artificial Sequence
  source: /note="Description of Artificial Sequence: Synthetic oligonucleotide"
agcaaaatgctcgaattcgtc

SEQ ID NO: 38751 - DNA, 21 bp, Artificial Sequence
  source: /note="Description of Artificial Sequence: Synthetic oligonucleotide"
agcaaaatgagcagactcgaa

SEQ ID NO: 38752 - DNA, 21 bp, Artificial Sequence
  source: /note="Description of Artificial Sequence: Synthetic oligonucleotide"
agcaaaaacaacccaagcctc

SEQ ID NO: 38753 - DNA, 21 bp, Artificial Sequence
  source: /note="Description of Artificial Sequence: Synthetic oligonucleotide"
agcaaaaacagccaagactac

SEQ ID NO: 38754 - DNA, 21 bp, Artificial Sequence
  source: /note="Description of Artificial Sequence: Synthetic oligonucleotide"
agcaaaaacagcgtcctcaac

SEQ ID NO: 38755 - DNA, 21 bp, Artificial Sequence
  source: /note="Description of Artificial Sequence: Synthetic oligonucleotide"
agcaaaaacgtctgcgaacca

SEQ ID NO: 38756 - DNA, 21 bp, Artificial Sequence
  source: /note="Description of Artificial Sequence: Synthetic oligonucleotide"
agcaaaccacacagagaagtc

SEQ ID NO: 38757 - DNA, 21 bp, Artificial Sequence
  source: /note="Description of Artificial Sequence: Synthetic oligonucleotide"
agcaaaccactcagcggattc

SEQ ID NO: 38758 - DNA, 21 bp, Artificial Sequence
  source: /note="Description of Artificial Sequence: Synthetic oligonucleotide"
agcaaaccaagcggaccaagc

SEQ ID NO: 38759 - DNA, 21 bp, Artificial Sequence
  source: /note="Description of Artificial Sequence: Synthetic oligonucleotide"
agcaaaccaacaccaacacac

SEQ ID NO: 38760 - DNA, 21 bp, Artificial Sequence
  source: /note="Description of Artificial Sequence: Synthetic oligonucleotide"
agcaaacaagcagcaagcgtc

SEQ ID NO: 38761 - DNA, 21 bp, Artificial Sequence
  source: /note="Description of Artificial Sequence: Synthetic oligonucleotide"
agcaaacaaatgccaatgcac

SEQ ID NO: 38762 - DNA, 21 bp, Artificial Sequence
  source: /note="Description of Artificial Sequence: Synthetic oligonucleotide"
agcaaaagaacaacatgggac

SEQ ID NO: 38763 - DNA, 21 bp, Artificial Sequence
  source: /note="Description of Artificial Sequence: Synthetic oligonucleotide"
agcaaaagcggaacaagcgaa

SEQ ID NO: 38764 - DNA, 21 bp, Artificial Sequence
  source: /note="Description of Artificial Sequence: Synthetic oligonucleotide"
agcaaaagcctcaaactcagc

SEQ ID NO: 38765 - DNA, 21 bp, Artificial Sequence
  source: /note="Description of Artificial Sequence: Synthetic oligonucleotide"
agcaaaagcccaaacccatac

SEQ ID NO: 38766 - DNA, 21 bp, Artificial Sequence
  source: /note="Description of Artificial Sequence: Synthetic oligonucleotide"
agcaaaagccaattcctcgca

SEQ ID NO: 38767 - DNA, 21 bp, Artificial Sequence
  source: /note="Description of Artificial Sequence: Synthetic oligonucleotide"
agcaaaagcagcatgctcatc

SEQ ID NO: 38768 - DNA, 21 bp, Artificial Sequence
  source: /note="Description of Artificial Sequence: Synthetic oligonucleotide"
agcaaaacagacagaatgaac

SEQ ID NO: 38769 - DNA, 21 bp, Artificial Sequence
  source: /note="Description of Artificial Sequence: Synthetic oligonucleotide"
agcaaaacaagcgacagaaca

SEQ ID NO: 38770 - DNA, 21 bp, Artificial Sequence
  source: /note="Description of Artificial Sequence: Synthetic oligonucleotide"
agcaaaacagtcgaacaaaac

SEQ ID NO: 38771 - DNA, 21 bp, Artificial Sequence
  source: /note="Description of Artificial Sequence: Synthetic oligonucleotide"
agcaaagtcccaagcctcgca

SEQ ID NO: 38772 - DNA, 21 bp, Artificial Sequence
  source: /note="Description of Artificial Sequence: Synthetic oligonucleotide"
agcaaagtcagagaaccaatc

SEQ ID NO: 38773 - DNA, 21 bp, Artificial Sequence
  source: /note="Description of Artificial Sequence: Synthetic oligonucleotide"
agcaaatacgcaacagtcgtc

SEQ ID NO: 38774 - DNA, 21 bp, Artificial Sequence
  source: /note="Description of Artificial Sequence: Synthetic oligonucleotide"
agcaaatacctcagaatggac

SEQ ID NO: 38775 - DNA, 21 bp, Artificial Sequence
  source: /note="Description of Artificial Sequence: Synthetic oligonucleotide"
agcaaatacacactcgcatac

SEQ ID NO: 38776 - DNA, 21 bp, Artificial Sequence
  source: /note="Description of Artificial Sequence: Synthetic oligonucleotide"
agcctcgcagacgcaaacgca

SEQ ID NO: 38777 - DNA, 21 bp, Artificial Sequence
  source: /note="Description of Artificial Sequence: Synthetic oligonucleotide"
agcctcgcaggaaacagcagc

SEQ ID NO: 38778 - DNA, 21 bp, Artificial Sequence
  source: /note="Description of Artificial Sequence: Synthetic oligonucleotide"
agcctcgcaaaaatgccagga

SEQ ID NO: 38779 - DNA, 21 bp, Artificial Sequence
  source: /note="Description of Artificial Sequence: Synthetic oligonucleotide"
agcctcgcactcgtcggaaga

SEQ ID NO: 38780 - DNA, 21 bp, Artificial Sequence
  source: /note="Description of Artificial Sequence: Synthetic oligonucleotide"
agcctcgcaccaacagtcatg

SEQ ID NO: 38781 - DNA, 21 bp, Artificial Sequence
  source: /note="Description of Artificial Sequence: Synthetic oligonucleotide"
agcctcgcacaaaaacaacca

SEQ ID NO: 38782 - DNA, 21 bp, Artificial Sequence
  source: /note="Description of Artificial Sequence: Synthetic oligonucleotide"
agcctcgcacaactccacagc

SEQ ID NO: 38783 - DNA, 21 bp, Artificial Sequence
  source: /note="Description of Artificial Sequence: Synthetic oligonucleotide"
agcctcgcaagcagcgcaatg

SEQ ID NO: 38784 - DNA, 21 bp, Artificial Sequence
  source: /note="Description of Artificial Sequence: Synthetic oligonucleotide"
agcctcgcaagcacaggattc

SEQ ID NO: 38785 - DNA, 21 bp, Artificial Sequence
  source: /note="Description of Artificial Sequence: Synthetic oligonucleotide"
agcctcgcaacaagaatcagc

SEQ ID NO: 38786 - DNA, 21 bp, Artificial Sequence
  source: /note="Description of Artificial Sequence: Synthetic oligonucleotide"
agcctcgcaacaagcccatac

SEQ ID NO: 38787 - DNA, 21 bp, Artificial Sequence
  source: /note="Description of Artificial Sequence: Synthetic oligonucleotide"
agcctcgacgcaacaaaagac

SEQ ID NO: 38788 - DNA, 21 bp, Artificial Sequence
  source: /note="Description of Artificial Sequence: Synthetic oligonucleotide"
agcctcgacttcccaagacca

SEQ ID NO: 38789 - DNA, 21 bp, Artificial Sequence
  source: /note="Description of Artificial Sequence: Synthetic oligonucleotide"
agcctcgaccaccacaacaga

SEQ ID NO: 38790 - DNA, 21 bp, Artificial Sequence
  source: /note="Description of Artificial Sequence: Synthetic oligonucleotide"
agcctcgacaaagcactcaga

SEQ ID NO: 38791 - DNA, 21 bp, Artificial Sequence
  source: /note="Description of Artificial Sequence: Synthetic oligonucleotide"
agcctcgacatgcaaaaacaa

SEQ ID NO: 38792 - DNA, 21 bp, Artificial Sequence
  source: /note="Description of Artificial Sequence: Synthetic oligonucleotide"
agcctcgacccaaaaaacagc

SEQ ID NO: 38793 - DNA, 21 bp, Artificial Sequence
  source: /note="Description of Artificial Sequence: Synthetic oligonucleotide"
agcctcgaaatcccaaaaatc

SEQ ID NO: 38794 - DNA, 21 bp, Artificial Sequence
  source: /note="Description of Artificial Sequence: Synthetic oligonucleotide"
agcctcgaaaaaagaggagaa

SEQ ID NO: 38795 - DNA, 21 bp, Artificial Sequence
  source: /note="Description of Artificial Sequence: Synthetic oligonucleotide"
agcctcgaaagacacgtctac

SEQ ID NO: 38796 - DNA, 21 bp, Artificial Sequence
  source: /note="Description of Artificial Sequence: Synthetic oligonucleotide"
agcctcgaaagcgaacacaga

SEQ ID NO: 38797 - DNA, 21 bp, Artificial Sequence
  source: /note="Description of Artificial Sequence: Synthetic oligonucleotide"
agcctcgaaagcatgatccac

SEQ ID NO: 38798 - DNA, 21 bp, Artificial Sequence
  source: /note="Description of Artificial Sequence: Synthetic oligonucleotide"
agcctcgaaagcagacactac

SEQ ID NO: 38799 - DNA, 21 bp, Artificial Sequence
  source: /note="Description of Artificial Sequence: Synthetic oligonucleotide"
agcctcgaagtcgtcagaaaa

SEQ ID NO: 38800 - DNA, 21 bp, Artificial Sequence
  source: /note="Description of Artificial Sequence: Synthetic oligonucleotide"
agcctcttcaaagacgtcagc

SEQ ID NO: 38801 - DNA, 21 bp, Artificial Sequence
  source: /note="Description of Artificial Sequence: Synthetic oligonucleotide"
agcctcttcccagcaggagga

SEQ ID NO: 38802 - DNA, 21 bp, Artificial Sequence
  source: /note="Description of Artificial Sequence: Synthetic oligonucleotide"
agcctcttcagcgcaagacca

SEQ ID NO: 38803 - DNA, 21 bp, Artificial Sequence
  source: /note="Description of Artificial Sequence: Synthetic oligonucleotide"
agcctcggattcagagcagga

SEQ ID NO: 38804 - DNA, 21 bp, Artificial Sequence
  source: /note="Description of Artificial Sequence: Synthetic oligonucleotide"
agcctcggaatcagcaacttc

SEQ ID NO: 38805 - DNA, 21 bp, Artificial Sequence
  source: /note="Description of Artificial Sequence: Synthetic oligonucleotide"
agcctcggaaaaacaagccca

SEQ ID NO: 38806 - DNA, 21 bp, Artificial Sequence
  source: /note="Description of Artificial Sequence: Synthetic oligonucleotide"
agcctcggaatgaaaagcgca

SEQ ID NO: 38807 - DNA, 21 bp, Artificial Sequence
  source: /note="Description of Artificial Sequence: Synthetic oligonucleotide"
agcctcggacaaagccaatac

SEQ ID NO: 38808 - DNA, 21 bp, Artificial Sequence
  source: /note="Description of Artificial Sequence: Synthetic oligonucleotide"
agcctcggaagaggaagcatc

SEQ ID NO: 38809 - DNA, 21 bp, Artificial Sequence
  source: /note="Description of Artificial Sequence: Synthetic oligonucleotide"
agcctcggaacaggagtcgga

SEQ ID NO: 38810 - DNA, 21 bp, Artificial Sequence
  source: /note="Description of Artificial Sequence: Synthetic oligonucleotide"
agcctccacgcaatcaaaaac

SEQ ID NO: 38811 - DNA, 21 bp, Artificial Sequence
  source: /note="Description of Artificial Sequence: Synthetic oligonucleotide"
agcctccacgcagtcgtcagc

SEQ ID NO: 38812 - DNA, 21 bp, Artificial Sequence
  source: /note="Description of Artificial Sequence: Synthetic oligonucleotide"
agcctccacgacatgagcgga

SEQ ID NO: 38813 - DNA, 21 bp, Artificial Sequence
  source: /note="Description of Artificial Sequence: Synthetic oligonucleotide"
agcctccacagcagcgacagc

SEQ ID NO: 38814 - DNA, 21 bp, Artificial Sequence
  source: /note="Description of Artificial Sequence: Synthetic oligonucleotide"
agcctcatcgacccatacgaa

SEQ ID NO: 38815 - DNA, 21 bp, Artificial Sequence
  source: /note="Description of Artificial Sequence: Synthetic oligonucleotide"
agcctcatcgacagacaccca

SEQ ID NO: 38816 - DNA, 21 bp, Artificial Sequence
  source: /note="Description of Artificial Sequence: Synthetic oligonucleotide"
agcctcatcggaggacaacaa

SEQ ID NO: 38817 - DNA, 21 bp, Artificial Sequence
  source: /note="Description of Artificial Sequence: Synthetic oligonucleotide"
agcctcatcagaagcagcaca

SEQ ID NO: 38818 - DNA, 21 bp, Artificial Sequence
  source: /note="Description of Artificial Sequence: Synthetic oligonucleotide"
agcctcatcagcgaaaaagga

SEQ ID NO: 38819 - DNA, 21 bp, Artificial Sequence
  source: /note="Description of Artificial Sequence: Synthetic oligonucleotide"
agcctcaaagcaagcccacca

SEQ ID NO: 38820 - DNA, 21 bp, Artificial Sequence
  source: /note="Description of Artificial Sequence: Synthetic oligonucleotide"
agcctcaaagaagcatggctc

SEQ ID NO: 38821 - DNA, 21 bp, Artificial Sequence
  source: /note="Description of Artificial Sequence: Synthetic oligonucleotide"
agcctcaaaatcccaacagca

SEQ ID NO: 38822 - DNA, 21 bp, Artificial Sequence
  source: /note="Description of Artificial Sequence: Synthetic oligonucleotide"
agcctcaaaaacgaactcgca

SEQ ID NO: 38823 - DNA, 21 bp, Artificial Sequence
  source: /note="Description of Artificial Sequence: Synthetic oligonucleotide"
agcctcaaaccaggaggagga

SEQ ID NO: 38824 - DNA, 21 bp, Artificial Sequence
  source: /note="Description of Artificial Sequence: Synthetic oligonucleotide"
agcctcaaaccataccaaagc

SEQ ID NO: 38825 - DNA, 21 bp, Artificial Sequence
  source: /note="Description of Artificial Sequence: Synthetic oligonucleotide"
agcctcaaacaaagccaccca

SEQ ID NO: 38826 - DNA, 21 bp, Artificial Sequence
  source: /note="Description of Artificial Sequence: Synthetic oligonucleotide"
agcctcaaaagcccacaactc

SEQ ID NO: 38827 - DNA, 21 bp, Artificial Sequence
  source: /note="Description of Artificial Sequence: Synthetic oligonucleotide"
agcctcaaaacatacccagaa

SEQ ID NO: 38828 - DNA, 21 bp, Artificial Sequence
  source: /note="Description of Artificial Sequence: Synthetic oligonucleotide"
agcctcctcgcaaaagtccca

SEQ ID NO: 38829 - DNA, 21 bp, Artificial Sequence
  source: /note="Description of Artificial Sequence: Synthetic oligonucleotide"
agcctcctcgacagaccaatc

SEQ ID NO: 38830 - DNA, 21 bp, Artificial Sequence
  source: /note="Description of Artificial Sequence: Synthetic oligonucleotide"
agcctcctcggaccaacacaa

SEQ ID NO: 38831 - DNA, 21 bp, Artificial Sequence
  source: /note="Description of Artificial Sequence: Synthetic oligonucleotide"
agcctcctcaaaccagtccaa

SEQ ID NO: 38832 - DNA, 21 bp, Artificial Sequence
  source: /note="Description of Artificial Sequence: Synthetic oligonucleotide"
agcctcctcctcctctgcgca

SEQ ID NO: 38833 - DNA, 21 bp, Artificial Sequence
  source: /note="Description of Artificial Sequence: Synthetic oligonucleotide"
agcctcctcctcaacagagga

SEQ ID NO: 38834 - DNA, 21 bp, Artificial Sequence
  source: /note="Description of Artificial Sequence: Synthetic oligonucleotide"
agcctcctcctccaaaaccca

SEQ ID NO: 38835 - DNA, 21 bp, Artificial Sequence
  source: /note="Description of Artificial Sequence: Synthetic oligonucleotide"
agcctcctcaacagcgacaca

SEQ ID NO: 38836 - DNA, 21 bp, Artificial Sequence
  source: /note="Description of Artificial Sequence: Synthetic oligonucleotide"
agcctcctcagacaagtccca

SEQ ID NO: 38837 - DNA, 21 bp, Artificial Sequence
  source: /note="Description of Artificial Sequence: Synthetic oligonucleotide"
agcctcctcagcgtcagccac

SEQ ID NO: 38838 - DNA, 21 bp, Artificial Sequence
  source: /note="Description of Artificial Sequence: Synthetic oligonucleotide"
agcctcctcacagcaagcgtc

SEQ ID NO: 38839 - DNA, 21 bp, Artificial Sequence
  source: /note="Description of Artificial Sequence: Synthetic oligonucleotide"
agcctcctcacaagcgcacca

SEQ ID NO: 38840 - DNA, 21 bp, Artificial Sequence
  source: /note="Description of Artificial Sequence: Synthetic oligonucleotide"
agcctcctcgtcaacctcagc

SEQ ID NO: 38841 - DNA, 21 bp, Artificial Sequence
  source: /note="Description of Artificial Sequence: Synthetic oligonucleotide"
agcctcctctacccaacacca

SEQ ID NO: 38842 - DNA, 21 bp, Artificial Sequence
  source: /note="Description of Artificial Sequence: Synthetic oligonucleotide"
agcctcatggcagcaggactc

SEQ ID NO: 38843 - DNA, 21 bp, Artificial Sequence
  source: /note="Description of Artificial Sequence: Synthetic oligonucleotide"
agcctcatggcaagcatcgga

SEQ ID NO: 38844 - DNA, 21 bp, Artificial Sequence
  source: /note="Description of Artificial Sequence: Synthetic oligonucleotide"
agcctcatgcacgacgtcagc

SEQ ID NO: 38845 - DNA, 21 bp, Artificial Sequence
  source: /note="Description of Artificial Sequence: Synthetic oligonucleotide"
agcctcatgagcctcgacaca

SEQ ID NO: 38846 - DNA, 21 bp, Artificial Sequence
  source: /note="Description of Artificial Sequence: Synthetic oligonucleotide"
agcctcatgagcccaagcatg

SEQ ID NO: 38847 - DNA, 21 bp, Artificial Sequence
  source: /note="Description of Artificial Sequence: Synthetic oligonucleotide"
agcctcaacctcagaggaaac

SEQ ID NO: 38848 - DNA, 21 bp, Artificial Sequence
  source: /note="Description of Artificial Sequence: Synthetic oligonucleotide"
agcctcaacaacgcaagaaac

SEQ ID NO: 38849 - DNA, 21 bp, Artificial Sequence
  source: /note="Description of Artificial Sequence: Synthetic oligonucleotide"
agcctcaacaacggactcaca

SEQ ID NO: 38850 - DNA, 21 bp, Artificial Sequence
  source: /note="Description of Artificial Sequence: Synthetic oligonucleotide"
agcctcaacaacagaccaagc

SEQ ID NO: 38851 - DNA, 21 bp, Artificial Sequence
  source: /note="Description of Artificial Sequence: Synthetic oligonucleotide"
agcctcaacccaaaaagccca

SEQ ID NO: 38852 - DNA, 21 bp, Artificial Sequence
  source: /note="Description of Artificial Sequence: Synthetic oligonucleotide"
agcctcaacccaagcggaatg

SEQ ID NO: 38853 - DNA, 21 bp, Artificial Sequence
  source: /note="Description of Artificial Sequence: Synthetic oligonucleotide"
agcctcaacagacaaggaaac

SEQ ID NO: 38854 - DNA, 21 bp, Artificial Sequence
  source: /note="Description of Artificial Sequence: Synthetic oligonucleotide"
agcctcaacagctacagccca

SEQ ID NO: 38855 - DNA, 21 bp, Artificial Sequence
  source: /note="Description of Artificial Sequence: Synthetic oligonucleotide"
agcctcaacacaggaacaatc

SEQ ID NO: 38856 - DNA, 21 bp, Artificial Sequence
  source: /note="Description of Artificial Sequence: Synthetic oligonucleotide"
agcctcaacacactcggaaca

SEQ ID NO: 38857 - DNA, 21 bp, Artificial Sequence
  source: /note="Description of Artificial Sequence: Synthetic oligonucleotide"
agcctcaacacaatgaacgca

SEQ ID NO: 38858 - DNA, 21 bp, Artificial Sequence
  source: /note="Description of Artificial Sequence: Synthetic oligonucleotide"
agcctcaacacaacaccagaa

SEQ ID NO: 38859 - DNA, 21 bp, Artificial Sequence
  source: /note="Description of Artificial Sequence: Synthetic oligonucleotide"
agcctcaacgtcgcagacgca

SEQ ID NO: 38860 - DNA, 21 bp, Artificial Sequence
  source: /note="Description of Artificial Sequence: Synthetic oligonucleotide"
agcctcccagcacaacaagtc

SEQ ID NO: 38861 - DNA, 21 bp, Artificial Sequence
  source: /note="Description of Artificial Sequence: Synthetic oligonucleotide"
agcctcccagcaagcacactc

SEQ ID NO: 38862 - DNA, 21 bp, Artificial Sequence
  source: /note="Description of Artificial Sequence: Synthetic oligonucleotide"
agcctcccagaaagcaacagc

SEQ ID NO: 38863 - DNA, 21 bp, Artificial Sequence
  source: /note="Description of Artificial Sequence: Synthetic oligonucleotide"
agcctcccaggaagcgtcatg

SEQ ID NO: 38864 - DNA, 21 bp, Artificial Sequence
  source: /note="Description of Artificial Sequence: Synthetic oligonucleotide"
agcctcccaggaacagtcaga

SEQ ID NO: 38865 - DNA, 21 bp, Artificial Sequence
  source: /note="Description of Artificial Sequence: Synthetic oligonucleotide"
agcctcccacacatcagacac

SEQ ID NO: 38866 - DNA, 21 bp, Artificial Sequence
  source: /note="Description of Artificial Sequence: Synthetic oligonucleotide"
agcctcccacacagctgcgga

SEQ ID NO: 38867 - DNA, 21 bp, Artificial Sequence
  source: /note="Description of Artificial Sequence: Synthetic oligonucleotide"
agcctcccaatcggaggaagc

SEQ ID NO: 38868 - DNA, 21 bp, Artificial Sequence
  source: /note="Description of Artificial Sequence: Synthetic oligonucleotide"
agcctcccaaaaccaagccac

SEQ ID NO: 38869 - DNA, 21 bp, Artificial Sequence
  source: /note="Description of Artificial Sequence: Synthetic oligonucleotide"
agcctcccactcaaagtcaac

SEQ ID NO: 38870 - DNA, 21 bp, Artificial Sequence
  source: /note="Description of Artificial Sequence: Synthetic oligonucleotide"
agcctcccactcagagacctc

SEQ ID NO: 38871 - DNA, 21 bp, Artificial Sequence
  source: /note="Description of Artificial Sequence: Synthetic oligonucleotide"
agcctcccaaacatcggaaca

SEQ ID NO: 38872 - DNA, 21 bp, Artificial Sequence
  source: /note="Description of Artificial Sequence: Synthetic oligonucleotide"
agcctcccacaaccaccactc

SEQ ID NO: 38873 - DNA, 21 bp, Artificial Sequence
  source: /note="Description of Artificial Sequence: Synthetic oligonucleotide"
agcctcccacaaacactcaga

SEQ ID NO: 38874 - DNA, 21 bp, Artificial Sequence
  source: /note="Description of Artificial Sequence: Synthetic oligonucleotide"
agcctcccaagaggaagcaac

SEQ ID NO: 38875 - DNA, 21 bp, Artificial Sequence
  source: /note="Description of Artificial Sequence: Synthetic oligonucleotide"
agcctcccaagcctcctcgga

SEQ ID NO: 38876 - DNA, 21 bp, Artificial Sequence
  source: /note="Description of Artificial Sequence: Synthetic oligonucleotide"
agcctcccaagcagcccaagc

SEQ ID NO: 38877 - DNA, 21 bp, Artificial Sequence
  source: /note="Description of Artificial Sequence: Synthetic oligonucleotide"
agcctcccaagcacacacgtc

SEQ ID NO: 38878 - DNA, 21 bp, Artificial Sequence
  source: /note="Description of Artificial Sequence: Synthetic oligonucleotide"
agcctcccaacaggaccaatc

SEQ ID NO: 38879 - DNA, 21 bp, Artificial Sequence
  source: /note="Description of Artificial Sequence: Synthetic oligonucleotide"
agcctcccaacaagcacaatg

SEQ ID NO: 38880 - DNA, 21 bp, Artificial Sequence
  source: /note="Description of Artificial Sequence: Synthetic oligonucleotide"
agcctcccagtcccaagcaga

SEQ ID NO: 38881 - DNA, 21 bp, Artificial Sequence
  source: /note="Description of Artificial Sequence: Synthetic oligonucleotide"
agcctcccagtcagaggagtc

SEQ ID NO: 38882 - DNA, 21 bp, Artificial Sequence
  source: /note="Description of Artificial Sequence: Synthetic oligonucleotide"
agcctcccagtcagcccaagc

SEQ ID NO: 38883 - DNA, 21 bp, Artificial Sequence
  source: /note="Description of Artificial Sequence: Synthetic oligonucleotide"
agcctcccagtcacaggaaga

SEQ ID NO: 38884 - DNA, 21 bp, Artificial Sequence
  source: /note="Description of Artificial Sequence: Synthetic oligonucleotide"
agcctccaattcacaagcagc

SEQ ID NO: 38885 - DNA, 21 bp, Artificial Sequence
  source: /note="Description of Artificial Sequence: Synthetic oligonucleotide"
agcctccaaagagacctcgtc

SEQ ID NO: 38886 - DNA, 21 bp, Artificial Sequence
  source: /note="Description of Artificial Sequence: Synthetic oligonucleotide"
agcctccaaagaccaacaatc

SEQ ID NO: 38887 - DNA, 21 bp, Artificial Sequence
  source: /note="Description of Artificial Sequence: Synthetic oligonucleotide"
agcctccaaagcagcagagga

SEQ ID NO: 38888 - DNA, 21 bp, Artificial Sequence
  source: /note="Description of Artificial Sequence: Synthetic oligonucleotide"
agcctccaaacagacaacgaa

SEQ ID NO: 38889 - DNA, 21 bp, Artificial Sequence
  source: /note="Description of Artificial Sequence: Synthetic oligonucleotide"
agcctccaaacaagcagagtc

SEQ ID NO: 38890 - DNA, 21 bp, Artificial Sequence
  source: /note="Description of Artificial Sequence: Synthetic oligonucleotide"
agcctccaatggacaagcgca

SEQ ID NO: 38891 - DNA, 21 bp, Artificial Sequence
  source: /note="Description of Artificial Sequence: Synthetic oligonucleotide"
agcctcagagcaaacacatac

SEQ ID NO: 38892 - DNA, 21 bp, Artificial Sequence
  source: /note="Description of Artificial Sequence: Synthetic oligonucleotide"
agcctcagagcagtcgtccca

SEQ ID NO: 38893 - DNA, 21 bp, Artificial Sequence
  source: /note="Description of Artificial Sequence: Synthetic oligonucleotide"
agcctcagagacagctaccac

SEQ ID NO: 38894 - DNA, 21 bp, Artificial Sequence
  source: /note="Description of Artificial Sequence: Synthetic oligonucleotide"
agcctcagagaagacgcacaa

SEQ ID NO: 38895 - DNA, 21 bp, Artificial Sequence
  source: /note="Description of Artificial Sequence: Synthetic oligonucleotide"
agcctcagaggaagcagcagc

SEQ ID NO: 38896 - DNA, 21 bp, Artificial Sequence
  source: /note="Description of Artificial Sequence: Synthetic oligonucleotide"
agcctcagacacagcgaaaca

SEQ ID NO: 38897 - DNA, 21 bp, Artificial Sequence
  source: /note="Description of Artificial Sequence: Synthetic oligonucleotide"
agcctcagaatcagcgcaaca

SEQ ID NO: 38898 - DNA, 21 bp, Artificial Sequence
  source: /note="Description of Artificial Sequence: Synthetic oligonucleotide"
agcctcagaccagaccaacac

SEQ ID NO: 38899 - DNA, 21 bp, Artificial Sequence
  source: /note="Description of Artificial Sequence: Synthetic oligonucleotide"
agcctcagaccaaacagcagc

SEQ ID NO: 38900 - DNA, 21 bp, Artificial Sequence
  source: /note="Description of Artificial Sequence: Synthetic oligonucleotide"
agcctcagaagcctcaacagc

SEQ ID NO: 38901 - DNA, 21 bp, Artificial Sequence
  source: /note="Description of Artificial Sequence: Synthetic oligonucleotide"
agcctcagaacaggagactac

SEQ ID NO: 38902 - DNA, 21 bp, Artificial Sequence
  source: /note="Description of Artificial Sequence: Synthetic oligonucleotide"
agcctcagaacaatcgcagca

SEQ ID NO: 38903 - DNA, 21 bp, Artificial Sequence
  source: /note="Description of Artificial Sequence: Synthetic oligonucleotide"
agcctcagaacaaacgtcgtc

SEQ ID NO: 38904 - DNA, 21 bp, Artificial Sequence
  source: /note="Description of Artificial Sequence: Synthetic oligonucleotide"
agcctcagaacaagcatggtc

SEQ ID NO: 38905 - DNA, 21 bp, Artificial Sequence
  source: /note="Description of Artificial Sequence: Synthetic oligonucleotide"
agcctcagagtcgcagaactc

SEQ ID NO: 38906 - DNA, 21 bp, Artificial Sequence
  source: /note="Description of Artificial Sequence: Synthetic oligonucleotide"
agcctcagagtcccagtcgca

SEQ ID NO: 38907 - DNA, 21 bp, Artificial Sequence
  source: /note="Description of Artificial Sequence: Synthetic oligonucleotide"
agcctcagcgcacacgacaga

SEQ ID NO: 38908 - DNA, 21 bp, Artificial Sequence
  source: /note="Description of Artificial Sequence: Synthetic oligonucleotide"
agcctcagcgaaacattcaga

SEQ ID NO: 38909 - DNA, 21 bp, Artificial Sequence
  source: /note="Description of Artificial Sequence: Synthetic oligonucleotide"
agcctcagcggagcaagagca

SEQ ID NO: 38910 - DNA, 21 bp, Artificial Sequence
  source: /note="Description of Artificial Sequence: Synthetic oligonucleotide"
agcctcagcggaaacacagac

SEQ ID NO: 38911 - DNA, 21 bp, Artificial Sequence
  source: /note="Description of Artificial Sequence: Synthetic oligonucleotide"
agcctcagcggaagaccaagc

SEQ ID NO: 38912 - DNA, 21 bp, Artificial Sequence
  source: /note="Description of Artificial Sequence: Synthetic oligonucleotide"
agcctcagccacttcccagca

SEQ ID NO: 38913 - DNA, 21 bp, Artificial Sequence
  source: /note="Description of Artificial Sequence: Synthetic oligonucleotide"
agcctcagccacagcgacgga

SEQ ID NO: 38914 - DNA, 21 bp, Artificial Sequence
  source: /note="Description of Artificial Sequence: Synthetic oligonucleotide"
agcctcagcatcgacaaagca

SEQ ID NO: 38915 - DNA, 21 bp, Artificial Sequence
  source: /note="Description of Artificial Sequence: Synthetic oligonucleotide"
agcctcagcaaaatgccaagc

SEQ ID NO: 38916 - DNA, 21 bp, Artificial Sequence
  source: /note="Description of Artificial Sequence: Synthetic oligonucleotide"
agcctcagcaaaccagtcgga

SEQ ID NO: 38917 - DNA, 21 bp, Artificial Sequence
  source: /note="Description of Artificial Sequence: Synthetic oligonucleotide"
agcctcagcccaagaacattc

SEQ ID NO: 38918 - DNA, 21 bp, Artificial Sequence
  source: /note="Description of Artificial Sequence: Synthetic oligonucleotide"
agcctcagccaaggaagcaac

SEQ ID NO: 38919 - DNA, 21 bp, Artificial Sequence
  source: /note="Description of Artificial Sequence: Synthetic oligonucleotide"
agcctcagcagagcaggacca

SEQ ID NO: 38920 - DNA, 21 bp, Artificial Sequence
  source: /note="Description of Artificial Sequence: Synthetic oligonucleotide"
agcctcagcagcgcaatcgga

SEQ ID NO: 38921 - DNA, 21 bp, Artificial Sequence
  source: /note="Description of Artificial Sequence: Synthetic oligonucleotide"
agcctcagcagcagaaacatc

SEQ ID NO: 38922 - DNA, 21 bp, Artificial Sequence
  source: /note="Description of Artificial Sequence: Synthetic oligonucleotide"
agcctcagcacaacaagcaaa

SEQ ID NO: 38923 - DNA, 21 bp, Artificial Sequence
  source: /note="Description of Artificial Sequence: Synthetic oligonucleotide"
agcctcagcgtcgaaccaaca

SEQ ID NO: 38924 - DNA, 21 bp, Artificial Sequence
  source: /note="Description of Artificial Sequence: Synthetic oligonucleotide"
agcctcagctacgcaaaccac

SEQ ID NO: 38925 - DNA, 21 bp, Artificial Sequence
  source: /note="Description of Artificial Sequence: Synthetic oligonucleotide"
agcctcagctacgcacaagaa

SEQ ID NO: 38926 - DNA, 21 bp, Artificial Sequence
  source: /note="Description of Artificial Sequence: Synthetic oligonucleotide"
agcctcacagcaggaggacac

SEQ ID NO: 38927 - DNA, 21 bp, Artificial Sequence
  source: /note="Description of Artificial Sequence: Synthetic oligonucleotide"
agcctcacattcagcacagga

SEQ ID NO: 38928 - DNA, 21 bp, Artificial Sequence
  source: /note="Description of Artificial Sequence: Synthetic oligonucleotide"
agcctcacaggagacggagtc

SEQ ID NO: 38929 - DNA, 21 bp, Artificial Sequence
  source: /note="Description of Artificial Sequence: Synthetic oligonucleotide"
agcctcacacacatcaaccac

SEQ ID NO: 38930 - DNA, 21 bp, Artificial Sequence
  source: /note="Description of Artificial Sequence: Synthetic oligonucleotide"
agcctcacacacatcccaatg

SEQ ID NO: 38931 - DNA, 21 bp, Artificial Sequence
  source: /note="Description of Artificial Sequence: Synthetic oligonucleotide"
agcctcacaatcgcagcagtc

SEQ ID NO: 38932 - DNA, 21 bp, Artificial Sequence
  source: /note="Description of Artificial Sequence: Synthetic oligonucleotide"
agcctcacaaacgaagcaaaa

SEQ ID NO: 38933 - DNA, 21 bp, Artificial Sequence
  source: /note="Description of Artificial Sequence: Synthetic oligonucleotide"
agcctcacaaacatcgcacaa

SEQ ID NO: 38934 - DNA, 21 bp, Artificial Sequence
  source: /note="Description of Artificial Sequence: Synthetic oligonucleotide"
agcctcacaccaatcatgaga

SEQ ID NO: 38935 - DNA, 21 bp, Artificial Sequence
  source: /note="Description of Artificial Sequence: Synthetic oligonucleotide"
agcctcacaccaagaagcaca

SEQ ID NO: 38936 - DNA, 21 bp, Artificial Sequence
  source: /note="Description of Artificial Sequence: Synthetic oligonucleotide"
agcctcacaccaagcttcgca

SEQ ID NO: 38937 - DNA, 21 bp, Artificial Sequence
  source: /note="Description of Artificial Sequence: Synthetic oligonucleotide"
agcctcacaagcgcaacaaca

SEQ ID NO: 38938 - DNA, 21 bp, Artificial Sequence
  source: /note="Description of Artificial Sequence: Synthetic oligonucleotide"
agcctcacaagcagaccaatg

SEQ ID NO: 38939 - DNA, 21 bp, Artificial Sequence
  source: /note="Description of Artificial Sequence: Synthetic oligonucleotide"
agcctcacaagcacaatgagc

SEQ ID NO: 38940 - DNA, 21 bp, Artificial Sequence
  source: /note="Description of Artificial Sequence: Synthetic oligonucleotide"
agcctcacagtcctcagaaac

SEQ ID NO: 38941 - DNA, 21 bp, Artificial Sequence
  source: /note="Description of Artificial Sequence: Synthetic oligonucleotide"
agcctcacatacgacaacagc

SEQ ID NO: 38942 - DNA, 21 bp, Artificial Sequence
  source: /note="Description of Artificial Sequence: Synthetic oligonucleotide"
agcctcacatacgaaagagac

SEQ ID NO: 38943 - DNA, 21 bp, Artificial Sequence
  source: /note="Description of Artificial Sequence: Synthetic oligonucleotide"
agcctcacatacggagcactc

SEQ ID NO: 38944 - DNA, 21 bp, Artificial Sequence
  source: /note="Description of Artificial Sequence: Synthetic oligonucleotide"
agcctcgtcgaaagaacaagc

SEQ ID NO: 38945 - DNA, 21 bp, Artificial Sequence
  source: /note="Description of Artificial Sequence: Synthetic oligonucleotide"
agcctcgtcggaacagtcgac

SEQ ID NO: 38946 - DNA, 21 bp, Artificial Sequence
  source: /note="Description of Artificial Sequence: Synthetic oligonucleotide"
agcctcgtccacagaagcaca

SEQ ID NO: 38947 - DNA, 21 bp, Artificial Sequence
  source: /note="Description of Artificial Sequence: Synthetic oligonucleotide"
agcctcgtcaacgaaacaagc

SEQ ID NO: 38948 - DNA, 21 bp, Artificial Sequence
  source: /note="Description of Artificial Sequence: Synthetic oligonucleotide"
agcctcgtccaaaaactcagc

SEQ ID NO: 38949 - DNA, 21 bp, Artificial Sequence
  source: /note="Description of Artificial Sequence: Synthetic oligonucleotide"
agcctcgtcagaagcggagac

SEQ ID NO: 38950 - DNA, 21 bp, Artificial Sequence
  source: /note="Description of Artificial Sequence: Synthetic oligonucleotide"
agcctcgtcagaagccaaaac

SEQ ID NO: 38951 - DNA, 21 bp, Artificial Sequence
  source: /note="Description of Artificial Sequence: Synthetic oligonucleotide"
agcctcgtcagcagaatcagc

SEQ ID NO: 38952 - DNA, 21 bp, Artificial Sequence
  source: /note="Description of Artificial Sequence: Synthetic oligonucleotide"
agcctcgtcacagcaggaagc

SEQ ID NO: 38953 - DNA, 21 bp, Artificial Sequence
  source: /note="Description of Artificial Sequence: Synthetic oligonucleotide"
agcctcgtcgtccaaagcgca

SEQ ID NO: 38954 - DNA, 21 bp, Artificial Sequence
  source: /note="Description of Artificial Sequence: Synthetic oligonucleotide"
agcctcgtctacgacccactc

SEQ ID NO: 38955 - DNA, 21 bp, Artificial Sequence
  source: /note="Description of Artificial Sequence: Synthetic oligonucleotide"
agcctctacagcggaaacgtc

SEQ ID NO: 38956 - DNA, 21 bp, Artificial Sequence
  source: /note="Description of Artificial Sequence: Synthetic oligonucleotide"
agcctctacgtcccaaaacac

SEQ ID NO: 38957 - DNA, 21 bp, Artificial Sequence
  source: /note="Description of Artificial Sequence: Synthetic oligonucleotide"
agcctctactacaaagaagaa

SEQ ID NO: 38958 - DNA, 21 bp, Artificial Sequence
  source: /note="Description of Artificial Sequence: Synthetic oligonucleotide"
agcatggcagcaacaccagca

SEQ ID NO: 38959 - DNA, 21 bp, Artificial Sequence
  source: /note="Description of Artificial Sequence: Synthetic oligonucleotide"
agcatggcactcagcggaatc

SEQ ID NO: 38960 - DNA, 21 bp, Artificial Sequence
  source: /note="Description of Artificial Sequence: Synthetic oligonucleotide"
agcatggcagtcagcgtccca

SEQ ID NO: 38961 - DNA, 21 bp, Artificial Sequence
  source: /note="Description of Artificial Sequence: Synthetic oligonucleotide"
agcatggactgcctcagccca

SEQ ID NO: 38962 - DNA, 21 bp, Artificial Sequence
  source: /note="Description of Artificial Sequence: Synthetic oligonucleotide"
agcatggacccaggagcaaga

SEQ ID NO: 38963 - DNA, 21 bp, Artificial Sequence
  source: /note="Description of Artificial Sequence: Synthetic oligonucleotide"
agcatggacagaaaaacagga

SEQ ID NO: 38964 - DNA, 21 bp, Artificial Sequence
  source: /note="Description of Artificial Sequence: Synthetic oligonucleotide"
agcatggacgtcagcgacaca

SEQ ID NO: 38965 - DNA, 21 bp, Artificial Sequence
  source: /note="Description of Artificial Sequence: Synthetic oligonucleotide"
agcatggaaagcagactcctc

SEQ ID NO: 38966 - DNA, 21 bp, Artificial Sequence
  source: /note="Description of Artificial Sequence: Synthetic oligonucleotide"
agcatgggagcaggaccaaca

SEQ ID NO: 38967 - DNA, 21 bp, Artificial Sequence
  source: /note="Description of Artificial Sequence: Synthetic oligonucleotide"
agcatgggagacaacagaaga

SEQ ID NO: 38968 - DNA, 21 bp, Artificial Sequence
  source: /note="Description of Artificial Sequence: Synthetic oligonucleotide"
agcatgggaagcagcgcactc

SEQ ID NO: 38969 - DNA, 21 bp, Artificial Sequence
  source: /note="Description of Artificial Sequence: Synthetic oligonucleotide"
agcatgcacgcactcagcgtc

SEQ ID NO: 38970 - DNA, 21 bp, Artificial Sequence
  source: /note="Description of Artificial Sequence: Synthetic oligonucleotide"
agcatgcaccaaacagtccac

SEQ ID NO: 38971 - DNA, 21 bp, Artificial Sequence
  source: /note="Description of Artificial Sequence: Synthetic oligonucleotide"
agcatgcacagaacaagccca

SEQ ID NO: 38972 - DNA, 21 bp, Artificial Sequence
  source: /note="Description of Artificial Sequence: Synthetic oligonucleotide"
agcatgcacacaacaacaaca

SEQ ID NO: 38973 - DNA, 21 bp, Artificial Sequence
  source: /note="Description of Artificial Sequence: Synthetic oligonucleotide"
agcatgcacgtcccaggagtc

SEQ ID NO: 38974 - DNA, 21 bp, Artificial Sequence
  source: /note="Description of Artificial Sequence: Synthetic oligonucleotide"
agcatgaaagcagtcctcaac

SEQ ID NO: 38975 - DNA, 21 bp, Artificial Sequence
  source: /note="Description of Artificial Sequence: Synthetic oligonucleotide"
agcatgctcgacagcctcctc

SEQ ID NO: 38976 - DNA, 21 bp, Artificial Sequence
  source: /note="Description of Artificial Sequence: Synthetic oligonucleotide"
agcatgctcaacgtcacagtc

SEQ ID NO: 38977 - DNA, 21 bp, Artificial Sequence
  source: /note="Description of Artificial Sequence: Synthetic oligonucleotide"
agcatgctcagcgcaagcctc

SEQ ID NO: 38978 - DNA, 21 bp, Artificial Sequence
  source: /note="Description of Artificial Sequence: Synthetic oligonucleotide"
agcatgatggcagtcaaacca

SEQ ID NO: 38979 - DNA, 21 bp, Artificial Sequence
  source: /note="Description of Artificial Sequence: Synthetic oligonucleotide"
agcatgatggaaccattcaaa

SEQ ID NO: 38980 - DNA, 21 bp, Artificial Sequence
  source: /note="Description of Artificial Sequence: Synthetic oligonucleotide"
agcatgatgaacacagtcgga

SEQ ID NO: 38981 - DNA, 21 bp, Artificial Sequence
  source: /note="Description of Artificial Sequence: Synthetic oligonucleotide"
agcatgatgcaaaaagtccca

SEQ ID NO: 38982 - DNA, 21 bp, Artificial Sequence
  source: /note="Description of Artificial Sequence: Synthetic oligonucleotide"
agcatgatgacaggactcgca

SEQ ID NO: 38983 - DNA, 21 bp, Artificial Sequence
  source: /note="Description of Artificial Sequence: Synthetic oligonucleotide"
agcatgatgtacatcgaacca

SEQ ID NO: 38984 - DNA, 21 bp, Artificial Sequence
  source: /note="Description of Artificial Sequence: Synthetic oligonucleotide"
agcatgaacctcggaagcaca

SEQ ID NO: 38985 - DNA, 21 bp, Artificial Sequence
  source: /note="Description of Artificial Sequence: Synthetic oligonucleotide"
agcatgaacccaggaagcgca

SEQ ID NO: 38986 - DNA, 21 bp, Artificial Sequence
  source: /note="Description of Artificial Sequence: Synthetic oligonucleotide"
agcatgaacccaatgacagtc

SEQ ID NO: 38987 - DNA, 21 bp, Artificial Sequence
  source: /note="Description of Artificial Sequence: Synthetic oligonucleotide"
agcatgaacgtctacgacaca

SEQ ID NO: 38988 - DNA, 21 bp, Artificial Sequence
  source: /note="Description of Artificial Sequence: Synthetic oligonucleotide"
agcatgccattcagcgtcgca

SEQ ID NO: 38989 - DNA, 21 bp, Artificial Sequence
  source: /note="Description of Artificial Sequence: Synthetic oligonucleotide"
agcatgccaggagtcgcaaac

SEQ ID NO: 38990 - DNA, 21 bp, Artificial Sequence
  source: /note="Description of Artificial Sequence: Synthetic oligonucleotide"
agcatgccacacacactcagc

SEQ ID NO: 38991 - DNA, 21 bp, Artificial Sequence
  source: /note="Description of Artificial Sequence: Synthetic oligonucleotide"
agcatgccaatgccaagccca

SEQ ID NO: 38992 - DNA, 21 bp, Artificial Sequence
  source: /note="Description of Artificial Sequence: Synthetic oligonucleotide"
agcatgccaaacgcaccaagc

SEQ ID NO: 38993 - DNA, 21 bp, Artificial Sequence
  source: /note="Description of Artificial Sequence: Synthetic oligonucleotide"
agcatgccaaacccataccaa

SEQ ID NO: 38994 - DNA, 21 bp, Artificial Sequence
  source: /note="Description of Artificial Sequence: Synthetic oligonucleotide"
agcatgccaagagacctcatc

SEQ ID NO: 38995 - DNA, 21 bp, Artificial Sequence
  source: /note="Description of Artificial Sequence: Synthetic oligonucleotide"
agcatgccaagagaaccagga

SEQ ID NO: 38996 - DNA, 21 bp, Artificial Sequence
  source: /note="Description of Artificial Sequence: Synthetic oligonucleotide"
agcatgccaagcccaagagtc

SEQ ID NO: 38997 - DNA, 21 bp, Artificial Sequence
  source: /note="Description of Artificial Sequence: Synthetic oligonucleotide"
agcatgagagcagcagcattc

SEQ ID NO: 38998 - DNA, 21 bp, Artificial Sequence
  source: /note="Description of Artificial Sequence: Synthetic oligonucleotide"
agcatgagagacacagacaga

SEQ ID NO: 38999 - DNA, 21 bp, Artificial Sequence
  source: /note="Description of Artificial Sequence: Synthetic oligonucleotide"
agcatgagaccaagcgacaac

SEQ ID NO: 39000 - DNA, 21 bp, Artificial Sequence
  source: /note="Description of Artificial Sequence: Synthetic oligonucleotide"
agcatgagaagcggagaacca

SEQ ID NO: 39001 - DNA, 21 bp, Artificial Sequence
  source: /note="Description of Artificial Sequence: Synthetic oligonucleotide"
agcatgagaagcagagacaca

SEQ ID NO: 39002 - DNA, 21 bp, Artificial Sequence
  source: /note="Description of Artificial Sequence: Synthetic oligonucleotide"
agcatgagaagcagcccactc

SEQ ID NO: 39003 - DNA, 21 bp, Artificial Sequence
  source: /note="Description of Artificial Sequence: Synthetic oligonucleotide"
agcatgagcggattcgacgtc

SEQ ID NO: 39004 - DNA, 21 bp, Artificial Sequence
  source: /note="Description of Artificial Sequence: Synthetic oligonucleotide"
agcatgagcggaagaatcaca

SEQ ID NO: 39005 - DNA, 21 bp, Artificial Sequence
  source: /note="Description of Artificial Sequence: Synthetic oligonucleotide"
agcatgagcctcagcggactc

SEQ ID NO: 39006 - DNA, 21 bp, Artificial Sequence
  source: /note="Description of Artificial Sequence: Synthetic oligonucleotide"
agcatgagcccaagccaccca

SEQ ID NO: 39007 - DNA, 21 bp, Artificial Sequence
  source: /note="Description of Artificial Sequence: Synthetic oligonucleotide"
agcatgagccaaccaacatac

SEQ ID NO: 39008 - DNA, 21 bp, Artificial Sequence
  source: /note="Description of Artificial Sequence: Synthetic oligonucleotide"
agcatgagcagaccacaacca

SEQ ID NO: 39009 - DNA, 21 bp, Artificial Sequence
  source: /note="Description of Artificial Sequence: Synthetic oligonucleotide"
agcatgagcagcttcccacca

SEQ ID NO: 39010 - DNA, 21 bp, Artificial Sequence
  source: /note="Description of Artificial Sequence: Synthetic oligonucleotide"
agcatgagcgtcgaaccatac

SEQ ID NO: 39011 - DNA, 21 bp, Artificial Sequence
  source: /note="Description of Artificial Sequence: Synthetic oligonucleotide"
agcatgacagcagacctcatc

SEQ ID NO: 39012 - DNA, 21 bp, Artificial Sequence
  source: /note="Description of Artificial Sequence: Synthetic oligonucleotide"
agcatgacagcactcacagca

SEQ ID NO: 39013 - DNA, 21 bp, Artificial Sequence
  source: /note="Description of Artificial Sequence: Synthetic oligonucleotide"
agcatgacaggaccagaactc

SEQ ID NO: 39014 - DNA, 21 bp, Artificial Sequence
  source: /note="Description of Artificial Sequence: Synthetic oligonucleotide"
agcatgacactcggaacagca

SEQ ID NO: 39015 - DNA, 21 bp, Artificial Sequence
  source: /note="Description of Artificial Sequence: Synthetic oligonucleotide"
agcatgacaccaagcgtcaca

SEQ ID NO: 39016 - DNA, 21 bp, Artificial Sequence
  source: /note="Description of Artificial Sequence: Synthetic oligonucleotide"
agcatgacaacaatcggacca

SEQ ID NO: 39017 - DNA, 21 bp, Artificial Sequence
  source: /note="Description of Artificial Sequence: Synthetic oligonucleotide"
agcatggtccaaggaagagtc

SEQ ID NO: 39018 - DNA, 21 bp, Artificial Sequence
  source: /note="Description of Artificial Sequence: Synthetic oligonucleotide"
agcatgtacgcagcaggaagc

SEQ ID NO: 39019 - DNA, 21 bp, Artificial Sequence
  source: /note="Description of Artificial Sequence: Synthetic oligonucleotide"
agcatgtacgacccaagagca

SEQ ID NO: 39020 - DNA, 21 bp, Artificial Sequence
  source: /note="Description of Artificial Sequence: Synthetic oligonucleotide"
agcaacgcagcaatcccactc

SEQ ID NO: 39021 - DNA, 21 bp, Artificial Sequence
  source: /note="Description of Artificial Sequence: Synthetic oligonucleotide"
agcaacgcactcaacatcgga

SEQ ID NO: 39022 - DNA, 21 bp, Artificial Sequence
  source: /note="Description of Artificial Sequence: Synthetic oligonucleotide"
agcaacgcaagagcaccagtc

SEQ ID NO: 39023 - DNA, 21 bp, Artificial Sequence
  source: /note="Description of Artificial Sequence: Synthetic oligonucleotide"
agcaacgcaagaccaccaagc

SEQ ID NO: 39024 - DNA, 21 bp, Artificial Sequence
  source: /note="Description of Artificial Sequence: Synthetic oligonucleotide"
agcaacgcaagccacagcgtc

SEQ ID NO: 39025 - DNA, 21 bp, Artificial Sequence
  source: /note="Description of Artificial Sequence: Synthetic oligonucleotide"
agcaacgcaagcatgatgcac

SEQ ID NO: 39026 - DNA, 21 bp, Artificial Sequence
  source: /note="Description of Artificial Sequence: Synthetic oligonucleotide"
agcaacgcaacaacaccaaca

SEQ ID NO: 39027 - DNA, 21 bp, Artificial Sequence
  source: /note="Description of Artificial Sequence: Synthetic oligonucleotide"
agcaactgcccaaaagactgc

SEQ ID NO: 39028 - DNA, 21 bp, Artificial Sequence
  source: /note="Description of Artificial Sequence: Synthetic oligonucleotide"
agcaactgcagcagcctcaaa

SEQ ID NO: 39029 - DNA, 21 bp, Artificial Sequence
  source: /note="Description of Artificial Sequence: Synthetic oligonucleotide"
agcaacgaaaacagaagcagc

SEQ ID NO: 39030 - DNA, 21 bp, Artificial Sequence
  source: /note="Description of Artificial Sequence: Synthetic oligonucleotide"
agcaacgaaagaacaacaaac

SEQ ID NO: 39031 - DNA, 21 bp, Artificial Sequence
  source: /note="Description of Artificial Sequence: Synthetic oligonucleotide"
agcaacttcacagaagcaatg

SEQ ID NO: 39032 - DNA, 21 bp, Artificial Sequence
  source: /note="Description of Artificial Sequence: Synthetic oligonucleotide"
agcaacggacacgacgcaagc

SEQ ID NO: 39033 - DNA, 21 bp, Artificial Sequence
  source: /note="Description of Artificial Sequence: Synthetic oligonucleotide"
agcaacggacacccaccatgg

SEQ ID NO: 39034 - DNA, 21 bp, Artificial Sequence
  source: /note="Description of Artificial Sequence: Synthetic oligonucleotide"
agcaacggaatcgacagcgga

SEQ ID NO: 39035 - DNA, 21 bp, Artificial Sequence
  source: /note="Description of Artificial Sequence: Synthetic oligonucleotide"
agcaacggactcaacagactc

SEQ ID NO: 39036 - DNA, 21 bp, Artificial Sequence
  source: /note="Description of Artificial Sequence: Synthetic oligonucleotide"
agcaacggaaacagagacagc

SEQ ID NO: 39037 - DNA, 21 bp, Artificial Sequence
  source: /note="Description of Artificial Sequence: Synthetic oligonucleotide"
agcaacggacaaacaagccca

SEQ ID NO: 39038 - DNA, 21 bp, Artificial Sequence
  source: /note="Description of Artificial Sequence: Synthetic oligonucleotide"
agcaacggaagcaaagtcgtc

SEQ ID NO: 39039 - DNA, 21 bp, Artificial Sequence
  source: /note="Description of Artificial Sequence: Synthetic oligonucleotide"
agcaacggaagcccaaaagca

SEQ ID NO: 39040 - DNA, 21 bp, Artificial Sequence
  source: /note="Description of Artificial Sequence: Synthetic oligonucleotide"
agcaacggaagcacatacaaa

SEQ ID NO: 39041 - DNA, 21 bp, Artificial Sequence
  source: /note="Description of Artificial Sequence: Synthetic oligonucleotide"
agcaacggaacaagaagctac

SEQ ID NO: 39042 - DNA, 21 bp, Artificial Sequence
  source: /note="Description of Artificial Sequence: Synthetic oligonucleotide"
agcaaccacgcacacagcctc

SEQ ID NO: 39043 - DNA, 21 bp, Artificial Sequence
  source: /note="Description of Artificial Sequence: Synthetic oligonucleotide"
agcaaccacgaaatcgactac

SEQ ID NO: 39044 - DNA, 21 bp, Artificial Sequence
  source: /note="Description of Artificial Sequence: Synthetic oligonucleotide"
agcaaccacggaggagtcagc

SEQ ID NO: 39045 - DNA, 21 bp, Artificial Sequence
  source: /note="Description of Artificial Sequence: Synthetic oligonucleotide"
agcaacatcggaggaggatac

SEQ ID NO: 39046 - DNA, 21 bp, Artificial Sequence
  source: /note="Description of Artificial Sequence: Synthetic oligonucleotide"
agcaacatcctccaagcaaca

SEQ ID NO: 39047 - DNA, 21 bp, Artificial Sequence
  source: /note="Description of Artificial Sequence: Synthetic oligonucleotide"
agcaacaaagcagcatacgca

SEQ ID NO: 39048 - DNA, 21 bp, Artificial Sequence
  source: /note="Description of Artificial Sequence: Synthetic oligonucleotide"
agcaacaaattcgtcacagca

SEQ ID NO: 39049 - DNA, 21 bp, Artificial Sequence
  source: /note="Description of Artificial Sequence: Synthetic oligonucleotide"
agcaacaaaggactcacagga

SEQ ID NO: 39050 - DNA, 21 bp, Artificial Sequence
  source: /note="Description of Artificial Sequence: Synthetic oligonucleotide"
agcaacaaaggaccagtcaca

SEQ ID NO: 39051 - DNA, 21 bp, Artificial Sequence
  source: /note="Description of Artificial Sequence: Synthetic oligonucleotide"
agcaacaaatacaacgaagtc

SEQ ID NO: 39052 - DNA, 21 bp, Artificial Sequence
  source: /note="Description of Artificial Sequence: Synthetic oligonucleotide"
agcaacctcgaaacaagcaga

SEQ ID NO: 39053 - DNA, 21 bp, Artificial Sequence
  source: /note="Description of Artificial Sequence: Synthetic oligonucleotide"
agcaacctcggattcccagca

SEQ ID NO: 39054 - DNA, 21 bp, Artificial Sequence
  source: /note="Description of Artificial Sequence: Synthetic oligonucleotide"
agcaacctcggaatcagcgca

SEQ ID NO: 39055 - DNA, 21 bp, Artificial Sequence
  source: /note="Description of Artificial Sequence: Synthetic oligonucleotide"
agcaacctcctccacgcaagc

SEQ ID NO: 39056 - DNA, 21 bp, Artificial Sequence
  source: /note="Description of Artificial Sequence: Synthetic oligonucleotide"
agcaacctcagcccagaacaa

SEQ ID NO: 39057 - DNA, 21 bp, Artificial Sequence
  source: /note="Description of Artificial Sequence: Synthetic oligonucleotide"
agcaacctcacaatgagcaac

SEQ ID NO: 39058 - DNA, 21 bp, Artificial Sequence
  source: /note="Description of Artificial Sequence: Synthetic oligonucleotide"
agcaacatggacacaagcaaa

SEQ ID NO: 39059 - DNA, 21 bp, Artificial Sequence
  source: /note="Description of Artificial Sequence: Synthetic oligonucleotide"
agcaacatgatgctcagcgaa

SEQ ID NO: 39060 - DNA, 21 bp, Artificial Sequence
  source: /note="Description of Artificial Sequence: Synthetic oligonucleotide"
agcaacatgagcgtcagcgga

SEQ ID NO: 39061 - DNA, 21 bp, Artificial Sequence
  source: /note="Description of Artificial Sequence: Synthetic oligonucleotide"
agcaacatggtcccaatgagc

SEQ ID NO: 39062 - DNA, 21 bp, Artificial Sequence
  source: /note="Description of Artificial Sequence: Synthetic oligonucleotide"
agcaacaacggagaacacgtc

SEQ ID NO: 39063 - DNA, 21 bp, Artificial Sequence
  source: /note="Description of Artificial Sequence: Synthetic oligonucleotide"
agcaacaaccaaagagtcgtc

SEQ ID NO: 39064 - DNA, 21 bp, Artificial Sequence
  source: /note="Description of Artificial Sequence: Synthetic oligonucleotide"
agcaacccagcactcagcaga

SEQ ID NO: 39065 - DNA, 21 bp, Artificial Sequence
  source: /note="Description of Artificial Sequence: Synthetic oligonucleotide"
agcaacccagcaagctacgtc

SEQ ID NO: 39066 - DNA, 21 bp, Artificial Sequence
  source: /note="Description of Artificial Sequence: Synthetic oligonucleotide"
agcaacccactcagaacactc

SEQ ID NO: 39067 - DNA, 21 bp, Artificial Sequence
  source: /note="Description of Artificial Sequence: Synthetic oligonucleotide"
agcaacccaatgacactcaca

SEQ ID NO: 39068 - DNA, 21 bp, Artificial Sequence
  source: /note="Description of Artificial Sequence: Synthetic oligonucleotide"
agcaacccaccaccactcagc

SEQ ID NO: 39069 - DNA, 21 bp, Artificial Sequence
  source: /note="Description of Artificial Sequence: Synthetic oligonucleotide"
agcaacccaccagtccaaaaa

SEQ ID NO: 39070 - DNA, 21 bp, Artificial Sequence
  source: /note="Description of Artificial Sequence: Synthetic oligonucleotide"
agcaacccaagcgcagcacca

SEQ ID NO: 39071 - DNA, 21 bp, Artificial Sequence
  source: /note="Description of Artificial Sequence: Synthetic oligonucleotide"
agcaaccaacaaggaatggca

SEQ ID NO: 39072 - DNA, 21 bp, Artificial Sequence
  source: /note="Description of Artificial Sequence: Synthetic oligonucleotide"
agcaaccaaagcccaccacca

SEQ ID NO: 39073 - DNA, 21 bp, Artificial Sequence
  source: /note="Description of Artificial Sequence: Synthetic oligonucleotide"
agcaacagcggaagagcacca

SEQ ID NO: 39074 - DNA, 21 bp, Artificial Sequence
  source: /note="Description of Artificial Sequence: Synthetic oligonucleotide"
agcaacagccacagcccagaa

SEQ ID NO: 39075 - DNA, 21 bp, Artificial Sequence
  source: /note="Description of Artificial Sequence: Synthetic oligonucleotide"
agcaacagcatcagcgcagca

SEQ ID NO: 39076 - DNA, 21 bp, Artificial Sequence
  source: /note="Description of Artificial Sequence: Synthetic oligonucleotide"
agcaacagcctcccagtcatg

SEQ ID NO: 39077 - DNA, 21 bp, Artificial Sequence
  source: /note="Description of Artificial Sequence: Synthetic oligonucleotide"
agcaacagcccaagaggatac

SEQ ID NO: 39078 - DNA, 21 bp, Artificial Sequence
  source: /note="Description of Artificial Sequence: Synthetic oligonucleotide"
agcaacagccaaccaaacgtc

SEQ ID NO: 39079 - DNA, 21 bp, Artificial Sequence
  source: /note="Description of Artificial Sequence: Synthetic oligonucleotide"
agcaacagcagagtcgcagga

SEQ ID NO: 39080 - DNA, 21 bp, Artificial Sequence
  source: /note="Description of Artificial Sequence: Synthetic oligonucleotide"
agcaacagcagcgcagtccac

SEQ ID NO: 39081 - DNA, 21 bp, Artificial Sequence
  source: /note="Description of Artificial Sequence: Synthetic oligonucleotide"
agcaacagcacaatcatctac

SEQ ID NO: 39082 - DNA, 21 bp, Artificial Sequence
  source: /note="Description of Artificial Sequence: Synthetic oligonucleotide"
agcaacagctacatgatgctc

SEQ ID NO: 39083 - DNA, 21 bp, Artificial Sequence
  source: /note="Description of Artificial Sequence: Synthetic oligonucleotide"
agcaacacactcagccaactc

SEQ ID NO: 39084 - DNA, 21 bp, Artificial Sequence
  source: /note="Description of Artificial Sequence: Synthetic oligonucleotide"
agcaacacaaacctcagcgaa

SEQ ID NO: 39085 - DNA, 21 bp, Artificial Sequence
  source: /note="Description of Artificial Sequence: Synthetic oligonucleotide"
agcaacacaacagcagcagtc

SEQ ID NO: 39086 - DNA, 21 bp, Artificial Sequence
  source: /note="Description of Artificial Sequence: Synthetic oligonucleotide"
agcaacgtcgcaatcgtccaa

SEQ ID NO: 39087 - DNA, 21 bp, Artificial Sequence
  source: /note="Description of Artificial Sequence: Synthetic oligonucleotide"
agcaacgtcgaaatcatggaa

SEQ ID NO: 39088 - DNA, 21 bp, Artificial Sequence
  source: /note="Description of Artificial Sequence: Synthetic oligonucleotide"
agcaacgtcggaacacacttc

SEQ ID NO: 39089 - DNA, 21 bp, Artificial Sequence
  source: /note="Description of Artificial Sequence: Synthetic oligonucleotide"
agcaacgtccacagcctccac

SEQ ID NO: 39090 - DNA, 21 bp, Artificial Sequence
  source: /note="Description of Artificial Sequence: Synthetic oligonucleotide"
agcaacgtcaacggagcagac

SEQ ID NO: 39091 - DNA, 21 bp, Artificial Sequence
  source: /note="Description of Artificial Sequence: Synthetic oligonucleotide"
agcaacgtcagagaagtcgca

SEQ ID NO: 39092 - DNA, 21 bp, Artificial Sequence
  source: /note="Description of Artificial Sequence: Synthetic oligonucleotide"
agcaacgtcagcccaagacca

SEQ ID NO: 39093 - DNA, 21 bp, Artificial Sequence
  source: /note="Description of Artificial Sequence: Synthetic oligonucleotide"
agcaacgtcgtcgtcctccac

SEQ ID NO: 39094 - DNA, 21 bp, Artificial Sequence
  source: /note="Description of Artificial Sequence: Synthetic oligonucleotide"
agcaactacagcctcaaccac

SEQ ID NO: 39095 - DNA, 21 bp, Artificial Sequence
  source: /note="Description of Artificial Sequence: Synthetic oligonucleotide"
agcccagcagcagaaatcaaa

SEQ ID NO: 39096 - DNA, 21 bp, Artificial Sequence
  source: /note="Description of Artificial Sequence: Synthetic oligonucleotide"
agcccagcactcaacagaagc

SEQ ID NO: 39097 - DNA, 21 bp, Artificial Sequence
  source: /note="Description of Artificial Sequence: Synthetic oligonucleotide"
agcccagcaaaccaatacgac

SEQ ID NO: 39098 - DNA, 21 bp, Artificial Sequence
  source: /note="Description of Artificial Sequence: Synthetic oligonucleotide"
agcccagcaccatacgcactc

SEQ ID NO: 39099 - DNA, 21 bp, Artificial Sequence
  source: /note="Description of Artificial Sequence: Synthetic oligonucleotide"
agcccagcacaaagcgacgac

SEQ ID NO: 39100 - DNA, 21 bp, Artificial Sequence
  source: /note="Description of Artificial Sequence: Synthetic oligonucleotide"
agcccagcaagagcaggatac

SEQ ID NO: 39101 - DNA, 21 bp, Artificial Sequence
  source: /note="Description of Artificial Sequence: Synthetic oligonucleotide"
agcccagcaagaaacctcatc

SEQ ID NO: 39102 - DNA, 21 bp, Artificial Sequence
  source: /note="Description of Artificial Sequence: Synthetic oligonucleotide"
agcccagcaagccaccacaga

SEQ ID NO: 39103 - DNA, 21 bp, Artificial Sequence
  source: /note="Description of Artificial Sequence: Synthetic oligonucleotide"
agcccagcagtcggatgccac

SEQ ID NO: 39104 - DNA, 21 bp, Artificial Sequence
  source: /note="Description of Artificial Sequence: Synthetic oligonucleotide"
agcccatgcccaggagacgca

SEQ ID NO: 39105 - DNA, 21 bp, Artificial Sequence
  source: /note="Description of Artificial Sequence: Synthetic oligonucleotide"
agcccagacctcccaggactc

SEQ ID NO: 39106 - DNA, 21 bp, Artificial Sequence
  source: /note="Description of Artificial Sequence: Synthetic oligonucleotide"
agcccagacctcagaacacca

SEQ ID NO: 39107 - DNA, 21 bp, Artificial Sequence
  source: /note="Description of Artificial Sequence: Synthetic oligonucleotide"
agcccagacagagcacaactc

SEQ ID NO: 39108 - DNA, 21 bp, Artificial Sequence
  source: /note="Description of Artificial Sequence: Synthetic oligonucleotide"
agcccagacagcaacggacca

SEQ ID NO: 39109 - DNA, 21 bp, Artificial Sequence
  source: /note="Description of Artificial Sequence: Synthetic oligonucleotide"
agcccagacgtcgtcgtcagc

SEQ ID NO: 39110 - DNA, 21 bp, Artificial Sequence
  source: /note="Description of Artificial Sequence: Synthetic oligonucleotide"
agcccagaattcggaacagga

SEQ ID NO: 39111 - DNA, 21 bp, Artificial Sequence
  source: /note="Description of Artificial Sequence: Synthetic oligonucleotide"
agcccagaactcccaaaagca

SEQ ID NO: 39112 - DNA, 21 bp, Artificial Sequence
  source: /note="Description of Artificial Sequence: Synthetic oligonucleotide"
agcccagaaagcagaatgcca

SEQ ID NO: 39113 - DNA, 21 bp, Artificial Sequence
  source: /note="Description of Artificial Sequence: Synthetic oligonucleotide"
agcccattcgacgcaaacgtc

SEQ ID NO: 39114 - DNA, 21 bp, Artificial Sequence
  source: /note="Description of Artificial Sequence: Synthetic oligonucleotide"
agcccattcccaccacaactc

SEQ ID NO: 39115 - DNA, 21 bp, Artificial Sequence
  source: /note="Description of Artificial Sequence: Synthetic oligonucleotide"
agcccattcagagaccaagaa

SEQ ID NO: 39116 - DNA, 21 bp, Artificial Sequence
  source: /note="Description of Artificial Sequence: Synthetic oligonucleotide"
agcccattcacaatgagacca

SEQ ID NO: 39117 - DNA, 21 bp, Artificial Sequence
  source: /note="Description of Artificial Sequence: Synthetic oligonucleotide"
agcccaggagacccagcagaa

SEQ ID NO: 39118 - DNA, 21 bp, Artificial Sequence
  source: /note="Description of Artificial Sequence: Synthetic oligonucleotide"
agcccaggaggacacgtcagc

SEQ ID NO: 39119 - DNA, 21 bp, Artificial Sequence
  source: /note="Description of Artificial Sequence: Synthetic oligonucleotide"
agcccaggacacccaccaagc

SEQ ID NO: 39120 - DNA, 21 bp, Artificial Sequence
  source: /note="Description of Artificial Sequence: Synthetic oligonucleotide"
agcccaggaatcagagacttc

SEQ ID NO: 39121 - DNA, 21 bp, Artificial Sequence
  source: /note="Description of Artificial Sequence: Synthetic oligonucleotide"
agcccaggaatcagcagactc

SEQ ID NO: 39122 - DNA, 21 bp, Artificial Sequence
  source: /note="Description of Artificial Sequence: Synthetic oligonucleotide"
agcccaggaccacacaaaagc

SEQ ID NO: 39123 - DNA, 21 bp, Artificial Sequence
  source: /note="Description of Artificial Sequence: Synthetic oligonucleotide"
agcccaggaagcggaaaaagc

SEQ ID NO: 39124 - DNA, 21 bp, Artificial Sequence
  source: /note="Description of Artificial Sequence: Synthetic oligonucleotide"
agcccaggaagcccaatgagc

SEQ ID NO: 39125 - DNA, 21 bp, Artificial Sequence
  source: /note="Description of Artificial Sequence: Synthetic oligonucleotide"
agcccaggaacactcccaaca

SEQ ID NO: 39126 - DNA, 21 bp, Artificial Sequence
  source: /note="Description of Artificial Sequence: Synthetic oligonucleotide"
agcccaggagtcatgccagga

SEQ ID NO: 39127 - DNA, 21 bp, Artificial Sequence
  source: /note="Description of Artificial Sequence: Synthetic oligonucleotide"
agcccacacgacgaaacaagc

SEQ ID NO: 39128 - DNA, 21 bp, Artificial Sequence
  source: /note="Description of Artificial Sequence: Synthetic oligonucleotide"
agcccacacgacagcccactc

SEQ ID NO: 39129 - DNA, 21 bp, Artificial Sequence
  source: /note="Description of Artificial Sequence: Synthetic oligonucleotide"
agcccacacatcacacacatg

SEQ ID NO: 39130 - DNA, 21 bp, Artificial Sequence
  source: /note="Description of Artificial Sequence: Synthetic oligonucleotide"
agcccacacaaaaacgcacac

SEQ ID NO: 39131 - DNA, 21 bp, Artificial Sequence
  source: /note="Description of Artificial Sequence: Synthetic oligonucleotide"
agcccacacctcagaggagca

SEQ ID NO: 39132 - DNA, 21 bp, Artificial Sequence
  source: /note="Description of Artificial Sequence: Synthetic oligonucleotide"
agcccacacccagaaaaccac

SEQ ID NO: 39133 - DNA, 21 bp, Artificial Sequence
  source: /note="Description of Artificial Sequence: Synthetic oligonucleotide"
agcccaatcgaaagaagaaca

SEQ ID NO: 39134 - DNA, 21 bp, Artificial Sequence
  source: /note="Description of Artificial Sequence: Synthetic oligonucleotide"
agcccaatccaaacaaacagc

SEQ ID NO: 39135 - DNA, 21 bp, Artificial Sequence
  source: /note="Description of Artificial Sequence: Synthetic oligonucleotide"
agcccaatccaaacacaagga

SEQ ID NO: 39136 - DNA, 21 bp, Artificial Sequence
  source: /note="Description of Artificial Sequence: Synthetic oligonucleotide"
agcccaatcagcatcaaaaac

SEQ ID NO: 39137 - DNA, 21 bp, Artificial Sequence
  source: /note="Description of Artificial Sequence: Synthetic oligonucleotide"
agcccaatcacaccaggaaga

SEQ ID NO: 39138 - DNA, 21 bp, Artificial Sequence
  source: /note="Description of Artificial Sequence: Synthetic oligonucleotide"
agcccaatcacatacaacaca

SEQ ID NO: 39139 - DNA, 21 bp, Artificial Sequence
  source: /note="Description of Artificial Sequence: Synthetic oligonucleotide"
agcccaaaaatcccaacacac

SEQ ID NO: 39140 - DNA, 21 bp, Artificial Sequence
  source: /note="Description of Artificial Sequence: Synthetic oligonucleotide"
agcccaaaaatcccatggaca

SEQ ID NO: 39141 - DNA, 21 bp, Artificial Sequence
  source: /note="Description of Artificial Sequence: Synthetic oligonucleotide"
agcccaaaaatgctcagaagc

SEQ ID NO: 39142 - DNA, 21 bp, Artificial Sequence
  source: /note="Description of Artificial Sequence: Synthetic oligonucleotide"
agcccaaaagtcgcaggagtc

SEQ ID NO: 39143 - DNA, 21 bp, Artificial Sequence
  source: /note="Description of Artificial Sequence: Synthetic oligonucleotide"
agcccactcgcagaagcaaga

SEQ ID NO: 39144 - DNA, 21 bp, Artificial Sequence
  source: /note="Description of Artificial Sequence: Synthetic oligonucleotide"
agcccactcgcaacaagagtc

SEQ ID NO: 39145 - DNA, 21 bp, Artificial Sequence
  source: /note="Description of Artificial Sequence: Synthetic oligonucleotide"
agcccactcatcgtcaacaca

SEQ ID NO: 39146 - DNA, 21 bp, Artificial Sequence
  source: /note="Description of Artificial Sequence: Synthetic oligonucleotide"
agcccactcctcctcgcaagc

SEQ ID NO: 39147 - DNA, 21 bp, Artificial Sequence
  source: /note="Description of Artificial Sequence: Synthetic oligonucleotide"
agcccactcccaccaagcaac

SEQ ID NO: 39148 - DNA, 21 bp, Artificial Sequence
  source: /note="Description of Artificial Sequence: Synthetic oligonucleotide"
agcccactcagagaaagagtc

SEQ ID NO: 39149 - DNA, 21 bp, Artificial Sequence
  source: /note="Description of Artificial Sequence: Synthetic oligonucleotide"
agcccactcagaagcgacgtc

SEQ ID NO: 39150 - DNA, 21 bp, Artificial Sequence
  source: /note="Description of Artificial Sequence: Synthetic oligonucleotide"
agcccactcacagacctcagc

SEQ ID NO: 39151 - DNA, 21 bp, Artificial Sequence
  source: /note="Description of Artificial Sequence: Synthetic oligonucleotide"
agcccactcacagacagctac

SEQ ID NO: 39152 - DNA, 21 bp, Artificial Sequence
  source: /note="Description of Artificial Sequence: Synthetic oligonucleotide"
agcccactcacaacagtccca

SEQ ID NO: 39153 - DNA, 21 bp, Artificial Sequence
  source: /note="Description of Artificial Sequence: Synthetic oligonucleotide"
agcccactcgtcagcacagca

SEQ ID NO: 39154 - DNA, 21 bp, Artificial Sequence
  source: /note="Description of Artificial Sequence: Synthetic oligonucleotide"
agcccaatgaaagcaggaaca

SEQ ID NO: 39155 - DNA, 21 bp, Artificial Sequence
  source: /note="Description of Artificial Sequence: Synthetic oligonucleotide"
agcccaatgagaatcgaacca

SEQ ID NO: 39156 - DNA, 21 bp, Artificial Sequence
  source: /note="Description of Artificial Sequence: Synthetic oligonucleotide"
agcccaatgagaccacaagaa

SEQ ID NO: 39157 - DNA, 21 bp, Artificial Sequence
  source: /note="Description of Artificial Sequence: Synthetic oligonucleotide"
agcccaaacgcactcctcgac

SEQ ID NO: 39158 - DNA, 21 bp, Artificial Sequence
  source: /note="Description of Artificial Sequence: Synthetic oligonucleotide"
agcccaaacgcaacaacagac

SEQ ID NO: 39159 - DNA, 21 bp, Artificial Sequence
  source: /note="Description of Artificial Sequence: Synthetic oligonucleotide"
agcccaaacatggacagactc

SEQ ID NO: 39160 - DNA, 21 bp, Artificial Sequence
  source: /note="Description of Artificial Sequence: Synthetic oligonucleotide"
agcccaaacatgggacaattc

SEQ ID NO: 39161 - DNA, 21 bp, Artificial Sequence
  source: /note="Description of Artificial Sequence: Synthetic oligonucleotide"
agcccaaacagagaaagcatg

SEQ ID NO: 39162 - DNA, 21 bp, Artificial Sequence
  source: /note="Description of Artificial Sequence: Synthetic oligonucleotide"
agcccaaacacaccaacattc

SEQ ID NO: 39163 - DNA, 21 bp, Artificial Sequence
  source: /note="Description of Artificial Sequence: Synthetic oligonucleotide"
agcccaaacacaagaacagca

SEQ ID NO: 39164 - DNA, 21 bp, Artificial Sequence
  source: /note="Description of Artificial Sequence: Synthetic oligonucleotide"
agcccaccaaacttcccagaa

SEQ ID NO: 39165 - DNA, 21 bp, Artificial Sequence
  source: /note="Description of Artificial Sequence: Synthetic oligonucleotide"
agcccaccacaagcaaacgca

SEQ ID NO: 39166 - DNA, 21 bp, Artificial Sequence
  source: /note="Description of Artificial Sequence: Synthetic oligonucleotide"
agcccaccacaagtcacaaaa

SEQ ID NO: 39167 - DNA, 21 bp, Artificial Sequence
  source: /note="Description of Artificial Sequence: Synthetic oligonucleotide"
agcccaccaagaaacatggaa

SEQ ID NO: 39168 - DNA, 21 bp, Artificial Sequence
  source: /note="Description of Artificial Sequence: Synthetic oligonucleotide"
agcccaccaagagtcggactc

SEQ ID NO: 39169 - DNA, 21 bp, Artificial Sequence
  source: /note="Description of Artificial Sequence: Synthetic oligonucleotide"
agcccaccaacagcaagagac

SEQ ID NO: 39170 - DNA, 21 bp, Artificial Sequence
  source: /note="Description of Artificial Sequence: Synthetic oligonucleotide"
agcccaccagtcagcttcgaa

SEQ ID NO: 39171 - DNA, 21 bp, Artificial Sequence
  source: /note="Description of Artificial Sequence: Synthetic oligonucleotide"
agcccacaaggaaacggagca

SEQ ID NO: 39172 - DNA, 21 bp, Artificial Sequence
  source: /note="Description of Artificial Sequence: Synthetic oligonucleotide"
agcccacaaggaacatacgtc

SEQ ID NO: 39173 - DNA, 21 bp, Artificial Sequence
  source: /note="Description of Artificial Sequence: Synthetic oligonucleotide"
agcccacaaatcacaagacca

SEQ ID NO: 39174 - DNA, 21 bp, Artificial Sequence
  source: /note="Description of Artificial Sequence: Synthetic oligonucleotide"
agcccacaaagaatcgaagac

SEQ ID NO: 39175 - DNA, 21 bp, Artificial Sequence
  source: /note="Description of Artificial Sequence: Synthetic oligonucleotide"
agcccacaaagaccaatgaac

SEQ ID NO: 39176 - DNA, 21 bp, Artificial Sequence
  source: /note="Description of Artificial Sequence: Synthetic oligonucleotide"
agcccaagagcaagaatcgac

SEQ ID NO: 39177 - DNA, 21 bp, Artificial Sequence
  source: /note="Description of Artificial Sequence: Synthetic oligonucleotide"
agcccaagagacccagaaatc

SEQ ID NO: 39178 - DNA, 21 bp, Artificial Sequence
  source: /note="Description of Artificial Sequence: Synthetic oligonucleotide"
agcccaagagaatgcggactc

SEQ ID NO: 39179 - DNA, 21 bp, Artificial Sequence
  source: /note="Description of Artificial Sequence: Synthetic oligonucleotide"
agcccaagaggaatgggactc

SEQ ID NO: 39180 - DNA, 21 bp, Artificial Sequence
  source: /note="Description of Artificial Sequence: Synthetic oligonucleotide"
agcccaagaggaatgccactc

SEQ ID NO: 39181 - DNA, 21 bp, Artificial Sequence
  source: /note="Description of Artificial Sequence: Synthetic oligonucleotide"
agcccaagacacaacctcgga

SEQ ID NO: 39182 - DNA, 21 bp, Artificial Sequence
  source: /note="Description of Artificial Sequence: Synthetic oligonucleotide"
agcccaagaatcagagacgac

SEQ ID NO: 39183 - DNA, 21 bp, Artificial Sequence
  source: /note="Description of Artificial Sequence: Synthetic oligonucleotide"
agcccaagaccaagctacgca

SEQ ID NO: 39184 - DNA, 21 bp, Artificial Sequence
  source: /note="Description of Artificial Sequence: Synthetic oligonucleotide"
agcccaagacaactcagcgtc

SEQ ID NO: 39185 - DNA, 21 bp, Artificial Sequence
  source: /note="Description of Artificial Sequence: Synthetic oligonucleotide"
agcccaagacaaaacatccca

SEQ ID NO: 39186 - DNA, 21 bp, Artificial Sequence
  source: /note="Description of Artificial Sequence: Synthetic oligonucleotide"
agcccaagacaaagcatcagc

SEQ ID NO: 39187 - DNA, 21 bp, Artificial Sequence
  source: /note="Description of Artificial Sequence: Synthetic oligonucleotide"
agcccaagaacagcactccca

SEQ ID NO: 39188 - DNA, 21 bp, Artificial Sequence
  source: /note="Description of Artificial Sequence: Synthetic oligonucleotide"
agcccaagaacaggactcgga

SEQ ID NO: 39189 - DNA, 21 bp, Artificial Sequence
  source: /note="Description of Artificial Sequence: Synthetic oligonucleotide"
agcccaagatggcacgaagac

SEQ ID NO: 39190 - DNA, 21 bp, Artificial Sequence
  source: /note="Description of Artificial Sequence: Synthetic oligonucleotide"
agcccaagcgcactcctccac

SEQ ID NO: 39191 - DNA, 21 bp, Artificial Sequence
  source: /note="Description of Artificial Sequence: Synthetic oligonucleotide"
agcccaagcgcaatgggaatc

SEQ ID NO: 39192 - DNA, 21 bp, Artificial Sequence
  source: /note="Description of Artificial Sequence: Synthetic oligonucleotide"
agcccaagcggaaacaacgga

SEQ ID NO: 39193 - DNA, 21 bp, Artificial Sequence
  source: /note="Description of Artificial Sequence: Synthetic oligonucleotide"
agcccaagcggaccagtcaga

SEQ ID NO: 39194 - DNA, 21 bp, Artificial Sequence
  source: /note="Description of Artificial Sequence: Synthetic oligonucleotide"
agcccaagcggaagcctcgca

SEQ ID NO: 39195 - DNA, 21 bp, Artificial Sequence
  source: /note="Description of Artificial Sequence: Synthetic oligonucleotide"
agcccaagcggagtcgcagga

SEQ ID NO: 39196 - DNA, 21 bp, Artificial Sequence
  source: /note="Description of Artificial Sequence: Synthetic oligonucleotide"
agcccaagcctcagcagaagc

SEQ ID NO: 39197 - DNA, 21 bp, Artificial Sequence
  source: /note="Description of Artificial Sequence: Synthetic oligonucleotide"
agcccaagcctcacagcagga

SEQ ID NO: 39198 - DNA, 21 bp, Artificial Sequence
  source: /note="Description of Artificial Sequence: Synthetic oligonucleotide"
agcccaagcctcacaagcgac

SEQ ID NO: 39199 - DNA, 21 bp, Artificial Sequence
  source: /note="Description of Artificial Sequence: Synthetic oligonucleotide"
agcccaagcatgccagcaaga

SEQ ID NO: 39200 - DNA, 21 bp, Artificial Sequence
  source: /note="Description of Artificial Sequence: Synthetic oligonucleotide"
agcccaagcagacacgaaatc

SEQ ID NO: 39201 - DNA, 21 bp, Artificial Sequence
  source: /note="Description of Artificial Sequence: Synthetic oligonucleotide"
agcccaagcagaatgaacagc

SEQ ID NO: 39202 - DNA, 21 bp, Artificial Sequence
  source: /note="Description of Artificial Sequence: Synthetic oligonucleotide"
agcccaagcagaccaagcaca

SEQ ID NO: 39203 - DNA, 21 bp, Artificial Sequence
  source: /note="Description of Artificial Sequence: Synthetic oligonucleotide"
agcccaagcagaacaagcctc

SEQ ID NO: 39204 - DNA, 21 bp, Artificial Sequence
  source: /note="Description of Artificial Sequence: Synthetic oligonucleotide"
agcccaagcagcctcaaagaa

SEQ ID NO: 39205 - DNA, 21 bp, Artificial Sequence
  source: /note="Description of Artificial Sequence: Synthetic oligonucleotide"
agcccaagcacaggaaaactc

SEQ ID NO: 39206 - DNA, 21 bp, Artificial Sequence
  source: /note="Description of Artificial Sequence: Synthetic oligonucleotide"
agcccaagcacactcccacca

SEQ ID NO: 39207 - DNA, 21 bp, Artificial Sequence
  source: /note="Description of Artificial Sequence: Synthetic oligonucleotide"
agcccaagcacaaacaacaca

SEQ ID NO: 39208 - DNA, 21 bp, Artificial Sequence
  source: /note="Description of Artificial Sequence: Synthetic oligonucleotide"
agcccaagcacaagaatggga

SEQ ID NO: 39209 - DNA, 21 bp, Artificial Sequence
  source: /note="Description of Artificial Sequence: Synthetic oligonucleotide"
agcccaagcgtcgcataccac

SEQ ID NO: 39210 - DNA, 21 bp, Artificial Sequence
  source: /note="Description of Artificial Sequence: Synthetic oligonucleotide"
agcccaagcgtcgaactcttc

SEQ ID NO: 39211 - DNA, 21 bp, Artificial Sequence
  source: /note="Description of Artificial Sequence: Synthetic oligonucleotide"
agcccaacagcaaaaatgtgg

SEQ ID NO: 39212 - DNA, 21 bp, Artificial Sequence
  source: /note="Description of Artificial Sequence: Synthetic oligonucleotide"
agcccaacatgcgtcgcatgc

SEQ ID NO: 39213 - DNA, 21 bp, Artificial Sequence
  source: /note="Description of Artificial Sequence: Synthetic oligonucleotide"
agcccaacagacttcatgaac

SEQ ID NO: 39214 - DNA, 21 bp, Artificial Sequence
  source: /note="Description of Artificial Sequence: Synthetic oligonucleotide"
agcccaacattcgtcggaaca

SEQ ID NO: 39215 - DNA, 21 bp, Artificial Sequence
  source: /note="Description of Artificial Sequence: Synthetic oligonucleotide"
agcccaacaggagtccaacca

SEQ ID NO: 39216 - DNA, 21 bp, Artificial Sequence
  source: /note="Description of Artificial Sequence: Synthetic oligonucleotide"
agcccaacaatcacagcaaga

SEQ ID NO: 39217 - DNA, 21 bp, Artificial Sequence
  source: /note="Description of Artificial Sequence: Synthetic oligonucleotide"
agcccaacactcagcccagga

SEQ ID NO: 39218 - DNA, 21 bp, Artificial Sequence
  source: /note="Description of Artificial Sequence: Synthetic oligonucleotide"
agcccaacaagaaacatcgtc

SEQ ID NO: 39219 - DNA, 21 bp, Artificial Sequence
  source: /note="Description of Artificial Sequence: Synthetic oligonucleotide"
agcccaacaagcagcgtcaca

SEQ ID NO: 39220 - DNA, 21 bp, Artificial Sequence
  source: /note="Description of Artificial Sequence: Synthetic oligonucleotide"
agcccaacaacacaaagaaca

SEQ ID NO: 39221 - DNA, 21 bp, Artificial Sequence
  source: /note="Description of Artificial Sequence: Synthetic oligonucleotide"
agcccaacagtcaacccaatc

SEQ ID NO: 39222 - DNA, 21 bp, Artificial Sequence
  source: /note="Description of Artificial Sequence: Synthetic oligonucleotide"
agcccaacagtcgtcctcgca

SEQ ID NO: 39223 - DNA, 21 bp, Artificial Sequence
  source: /note="Description of Artificial Sequence: Synthetic oligonucleotide"
agcccaacatacacaatcgac

SEQ ID NO: 39224 - DNA, 21 bp, Artificial Sequence
  source: /note="Description of Artificial Sequence: Synthetic oligonucleotide"
agcccagtcgcaagaaacaac

SEQ ID NO: 39225 - DNA, 21 bp, Artificial Sequence
  source: /note="Description of Artificial Sequence: Synthetic oligonucleotide"
agcccagtcggaggaaaagac

SEQ ID NO: 39226 - DNA, 21 bp, Artificial Sequence
  source: /note="Description of Artificial Sequence: Synthetic oligonucleotide"
agcccagtcggaagcagcgga

SEQ ID NO: 39227 - DNA, 21 bp, Artificial Sequence
  source: /note="Description of Artificial Sequence: Synthetic oligonucleotide"
agcccagtcatgctccaaagc

SEQ ID NO: 39228 - DNA, 21 bp, Artificial Sequence
  source: /note="Description of Artificial Sequence: Synthetic oligonucleotide"
agcccagtcagacacccaagc

SEQ ID NO: 39229 - DNA, 21 bp, Artificial Sequence
  source: /note="Description of Artificial Sequence: Synthetic oligonucleotide"
agcccagtcagcgacaaccca

SEQ ID NO: 39230 - DNA, 21 bp, Artificial Sequence
  source: /note="Description of Artificial Sequence: Synthetic oligonucleotide"
agcccagtcgtcgcacaacca

SEQ ID NO: 39231 - DNA, 21 bp, Artificial Sequence
  source: /note="Description of Artificial Sequence: Synthetic oligonucleotide"
agcccagtcgtcccaagagca

SEQ ID NO: 39232 - DNA, 21 bp, Artificial Sequence
  source: /note="Description of Artificial Sequence: Synthetic oligonucleotide"
agcccatacggacaccaaaac

SEQ ID NO: 39233 - DNA, 21 bp, Artificial Sequence
  source: /note="Description of Artificial Sequence: Synthetic oligonucleotide"
agcccatacaaacaaaacagc

SEQ ID NO: 39234 - DNA, 21 bp, Artificial Sequence
  source: /note="Description of Artificial Sequence: Synthetic oligonucleotide"
agcccatacaacatcacaagc

SEQ ID NO: 39235 - DNA, 21 bp, Artificial Sequence
  source: /note="Description of Artificial Sequence: Synthetic oligonucleotide"
agcccatacccagcactcctc

SEQ ID NO: 39236 - DNA, 21 bp, Artificial Sequence
  source: /note="Description of Artificial Sequence: Synthetic oligonucleotide"
agccaagcaggagcaatccca

SEQ ID NO: 39237 - DNA, 21 bp, Artificial Sequence
  source: /note="Description of Artificial Sequence: Synthetic oligonucleotide"
agccaagcaatgcaaacactc

SEQ ID NO: 39238 - DNA, 21 bp, Artificial Sequence
  source: /note="Description of Artificial Sequence: Synthetic oligonucleotide"
agccaagcaccaagagaccca

SEQ ID NO: 39239 - DNA, 21 bp, Artificial Sequence
  source: /note="Description of Artificial Sequence: Synthetic oligonucleotide"
agccaagcaacaggaagaagc

SEQ ID NO: 39240 - DNA, 21 bp, Artificial Sequence
  source: /note="Description of Artificial Sequence: Synthetic oligonucleotide"
agccaagcaacacaacacaac

SEQ ID NO: 39241 - DNA, 21 bp, Artificial Sequence
  source: /note="Description of Artificial Sequence: Synthetic oligonucleotide"
agccaagcagtcccaccaagc

SEQ ID NO: 39242 - DNA, 21 bp, Artificial Sequence
  source: /note="Description of Artificial Sequence: Synthetic oligonucleotide"
agccaagacatgtacagagga

SEQ ID NO: 39243 - DNA, 21 bp, Artificial Sequence
  source: /note="Description of Artificial Sequence: Synthetic oligonucleotide"
agccaagacaacgtccaagaa

SEQ ID NO: 39244 - DNA, 21 bp, Artificial Sequence
  source: /note="Description of Artificial Sequence: Synthetic oligonucleotide"
agccaagactggaacctcaca

SEQ ID NO: 39245 - DNA, 21 bp, Artificial Sequence
  source: /note="Description of Artificial Sequence: Synthetic oligonucleotide"
agccaagaactcccaggaagc

SEQ ID NO: 39246 - DNA, 21 bp, Artificial Sequence
  source: /note="Description of Artificial Sequence: Synthetic oligonucleotide"
agccaagaaagctacatggac

SEQ ID NO: 39247 - DNA, 21 bp, Artificial Sequence
  source: /note="Description of Artificial Sequence: Synthetic oligonucleotide"
agccaattcgaagcaagacca

SEQ ID NO: 39248 - DNA, 21 bp, Artificial Sequence
  source: /note="Description of Artificial Sequence: Synthetic oligonucleotide"
agccaattcaaaccaacattc

SEQ ID NO: 39249 - DNA, 21 bp, Artificial Sequence
  source: /note="Description of Artificial Sequence: Synthetic oligonucleotide"
agccaattcctcgcagacatc

SEQ ID NO: 39250 - DNA, 21 bp, Artificial Sequence
  source: /note="Description of Artificial Sequence: Synthetic oligonucleotide"
agccaaggagcaagaaacgac

SEQ ID NO: 39251 - DNA, 21 bp, Artificial Sequence
  source: /note="Description of Artificial Sequence: Synthetic oligonucleotide"
agccaaggattcaacagcagc

SEQ ID NO: 39252 - DNA, 21 bp, Artificial Sequence
  source: /note="Description of Artificial Sequence: Synthetic oligonucleotide"
agccaaggacacgcactccca

SEQ ID NO: 39253 - DNA, 21 bp, Artificial Sequence
  source: /note="Description of Artificial Sequence: Synthetic oligonucleotide"
agccaaggaagcgtccaagga

SEQ ID NO: 39254 - DNA, 21 bp, Artificial Sequence
  source: /note="Description of Artificial Sequence: Synthetic oligonucleotide"
agccaaggagtcagagtcgga

SEQ ID NO: 39255 - DNA, 21 bp, Artificial Sequence
  source: /note="Description of Artificial Sequence: Synthetic oligonucleotide"
agccaacacctcagcgtcaac

SEQ ID NO: 39256 - DNA, 21 bp, Artificial Sequence
  source: /note="Description of Artificial Sequence: Synthetic oligonucleotide"
agccaacacccaatcagagaa

SEQ ID NO: 39257 - DNA, 21 bp, Artificial Sequence
  source: /note="Description of Artificial Sequence: Synthetic oligonucleotide"
agccaacacccaccaggagac

SEQ ID NO: 39258 - DNA, 21 bp, Artificial Sequence
  source: /note="Description of Artificial Sequence: Synthetic oligonucleotide"
agccaacacagagaccaccca

SEQ ID NO: 39259 - DNA, 21 bp, Artificial Sequence
  source: /note="Description of Artificial Sequence: Synthetic oligonucleotide"
agccaacacgtcgcaagccca

SEQ ID NO: 39260 - DNA, 21 bp, Artificial Sequence
  source: /note="Description of Artificial Sequence: Synthetic oligonucleotide"
agccaaatcagctgcggactc

SEQ ID NO: 39261 - DNA, 21 bp, Artificial Sequence
  source: /note="Description of Artificial Sequence: Synthetic oligonucleotide"
agccaaaaaccaatggtcgca

SEQ ID NO: 39262 - DNA, 21 bp, Artificial Sequence
  source: /note="Description of Artificial Sequence: Synthetic oligonucleotide"
agccaaaaaagccacggaaac

SEQ ID NO: 39263 - DNA, 21 bp, Artificial Sequence
  source: /note="Description of Artificial Sequence: Synthetic oligonucleotide"
agccaactcgacatcaacgga

SEQ ID NO: 39264 - DNA, 21 bp, Artificial Sequence
  source: /note="Description of Artificial Sequence: Synthetic oligonucleotide"
agccaaatggacgacacactc

SEQ ID NO: 39265 - DNA, 21 bp, Artificial Sequence
  source: /note="Description of Artificial Sequence: Synthetic oligonucleotide"
agccaaatgctcccagcacca

SEQ ID NO: 39266 - DNA, 21 bp, Artificial Sequence
  source: /note="Description of Artificial Sequence: Synthetic oligonucleotide"
agccaaatgctcacaggacca

SEQ ID NO: 39267 - DNA, 21 bp, Artificial Sequence
  source: /note="Description of Artificial Sequence: Synthetic oligonucleotide"
agccaaatgagagaaccagtc

SEQ ID NO: 39268 - DNA, 21 bp, Artificial Sequence
  source: /note="Description of Artificial Sequence: Synthetic oligonucleotide"
agccaaaacctcgtcatcagc

SEQ ID NO: 39269 - DNA, 21 bp, Artificial Sequence
  source: /note="Description of Artificial Sequence: Synthetic oligonucleotide"
agccaaaacagcctcagcgaa

SEQ ID NO: 39270 - DNA, 21 bp, Artificial Sequence
  source: /note="Description of Artificial Sequence: Synthetic oligonucleotide"
agccaaaacacaggacaaaac

SEQ ID NO: 39271 - DNA, 21 bp, Artificial Sequence
  source: /note="Description of Artificial Sequence: Synthetic oligonucleotide"
agccaaccacacttcgcaagc

SEQ ID NO: 39272 - DNA, 21 bp, Artificial Sequence
  source: /note="Description of Artificial Sequence: Synthetic oligonucleotide"
agccaaccaatggcaagaatg

SEQ ID NO: 39273 - DNA, 21 bp, Artificial Sequence
  source: /note="Description of Artificial Sequence: Synthetic oligonucleotide"
agccaaccaatgccaccagca

SEQ ID NO: 39274 - DNA, 21 bp, Artificial Sequence
  source: /note="Description of Artificial Sequence: Synthetic oligonucleotide"
agccaaccaaacccagcagtc

SEQ ID NO: 39275 - DNA, 21 bp, Artificial Sequence
  source: /note="Description of Artificial Sequence: Synthetic oligonucleotide"
agccaaccaacaacagcaaga

SEQ ID NO: 39276 - DNA, 21 bp, Artificial Sequence
  source: /note="Description of Artificial Sequence: Synthetic oligonucleotide"
agccaaccagtcacagcagga

SEQ ID NO: 39277 - DNA, 21 bp, Artificial Sequence
  source: /note="Description of Artificial Sequence: Synthetic oligonucleotide"
agccaacaagacccaatcctc

SEQ ID NO: 39278 - DNA, 21 bp, Artificial Sequence
  source: /note="Description of Artificial Sequence: Synthetic oligonucleotide"
agccaaagagcaccaatccca

SEQ ID NO: 39279 - DNA, 21 bp, Artificial Sequence
  source: /note="Description of Artificial Sequence: Synthetic oligonucleotide"
agccaaagagcaacagcactc

SEQ ID NO: 39280 - DNA, 21 bp, Artificial Sequence
  source: /note="Description of Artificial Sequence: Synthetic oligonucleotide"
agccaaagaatcctcgacaca

SEQ ID NO: 39281 - DNA, 21 bp, Artificial Sequence
  source: /note="Description of Artificial Sequence: Synthetic oligonucleotide"
agccaaagaagcggaagagaa

SEQ ID NO: 39282 - DNA, 21 bp, Artificial Sequence
  source: /note="Description of Artificial Sequence: Synthetic oligonucleotide"
agccaaagaagcacactcaca

SEQ ID NO: 39283 - DNA, 21 bp, Artificial Sequence
  source: /note="Description of Artificial Sequence: Synthetic oligonucleotide"
agccaaagagtcgcaagcgaa

SEQ ID NO: 39284 - DNA, 21 bp, Artificial Sequence
  source: /note="Description of Artificial Sequence: Synthetic oligonucleotide"
agccaaagagtcagccaaagc

SEQ ID NO: 39285 - DNA, 21 bp, Artificial Sequence
  source: /note="Description of Artificial Sequence: Synthetic oligonucleotide"
agccaaagcttcagcgtcgac

SEQ ID NO: 39286 - DNA, 21 bp, Artificial Sequence
  source: /note="Description of Artificial Sequence: Synthetic oligonucleotide"
agccaaagcggaagcagcaac

SEQ ID NO: 39287 - DNA, 21 bp, Artificial Sequence
  source: /note="Description of Artificial Sequence: Synthetic oligonucleotide"
agccaaagcatgagaagcagc

SEQ ID NO: 39288 - DNA, 21 bp, Artificial Sequence
  source: /note="Description of Artificial Sequence: Synthetic oligonucleotide"
agccaaagcccagtcctcaaa

SEQ ID NO: 39289 - DNA, 21 bp, Artificial Sequence
  source: /note="Description of Artificial Sequence: Synthetic oligonucleotide"
agccaaagccaaatgctccca

SEQ ID NO: 39290 - DNA, 21 bp, Artificial Sequence
  source: /note="Description of Artificial Sequence: Synthetic oligonucleotide"
agccaaagcagattcagcgca

SEQ ID NO: 39291 - DNA, 21 bp, Artificial Sequence
  source: /note="Description of Artificial Sequence: Synthetic oligonucleotide"
agccaaagcagaatgcaacca

SEQ ID NO: 39292 - DNA, 21 bp, Artificial Sequence
  source: /note="Description of Artificial Sequence: Synthetic oligonucleotide"
agccaaagcagcatcagactc

SEQ ID NO: 39293 - DNA, 21 bp, Artificial Sequence
  source: /note="Description of Artificial Sequence: Synthetic oligonucleotide"
agccaaagcagcaactaccca

SEQ ID NO: 39294 - DNA, 21 bp, Artificial Sequence
  source: /note="Description of Artificial Sequence: Synthetic oligonucleotide"
agccaaagcacatacaacatc

SEQ ID NO: 39295 - DNA, 21 bp, Artificial Sequence
  source: /note="Description of Artificial Sequence: Synthetic oligonucleotide"
agccaaacaggactcctcaca

SEQ ID NO: 39296 - DNA, 21 bp, Artificial Sequence
  source: /note="Description of Artificial Sequence: Synthetic oligonucleotide"
agccaaacaatcccagacagc

SEQ ID NO: 39297 - DNA, 21 bp, Artificial Sequence
  source: /note="Description of Artificial Sequence: Synthetic oligonucleotide"
agccaaacaaaaagccaacac

SEQ ID NO: 39298 - DNA, 21 bp, Artificial Sequence
  source: /note="Description of Artificial Sequence: Synthetic oligonucleotide"
agccaaacaccaagaagcaca

SEQ ID NO: 39299 - DNA, 21 bp, Artificial Sequence
  source: /note="Description of Artificial Sequence: Synthetic oligonucleotide"
agccaaacacaacacagaatc

SEQ ID NO: 39300 - DNA, 21 bp, Artificial Sequence
  source: /note="Description of Artificial Sequence: Synthetic oligonucleotide"
agccaaacagtcggagtcagc

SEQ ID NO: 39301 - DNA, 21 bp, Artificial Sequence
  source: /note="Description of Artificial Sequence: Synthetic oligonucleotide"
agccaagtcggagcaccaaca

SEQ ID NO: 39302 - DNA, 21 bp, Artificial Sequence
  source: /note="Description of Artificial Sequence: Synthetic oligonucleotide"
agccaagtcggaatgtacaga

SEQ ID NO: 39303 - DNA, 21 bp, Artificial Sequence
  source: /note="Description of Artificial Sequence: Synthetic oligonucleotide"
agccaatgggtcccaacaaac

SEQ ID NO: 39304 - DNA, 21 bp, Artificial Sequence
  source: /note="Description of Artificial Sequence: Synthetic oligonucleotide"
agccaatacgcaagcctcgac

SEQ ID NO: 39305 - DNA, 21 bp, Artificial Sequence
  source: /note="Description of Artificial Sequence: Synthetic oligonucleotide"
agccaatacacaaaattccaa

SEQ ID NO: 39306 - DNA, 21 bp, Artificial Sequence
  source: /note="Description of Artificial Sequence: Synthetic oligonucleotide"
agccaatacgtcccaagcagc

SEQ ID NO: 39307 - DNA, 21 bp, Artificial Sequence
  source: /note="Description of Artificial Sequence: Synthetic oligonucleotide"
agcagagcagcaatggacgga

SEQ ID NO: 39308 - DNA, 21 bp, Artificial Sequence
  source: /note="Description of Artificial Sequence: Synthetic oligonucleotide"
agcagagcagacatcttcctc

SEQ ID NO: 39309 - DNA, 21 bp, Artificial Sequence
  source: /note="Description of Artificial Sequence: Synthetic oligonucleotide"
agcagagcaggaagaagcgaa

SEQ ID NO: 39310 - DNA, 21 bp, Artificial Sequence
  source: /note="Description of Artificial Sequence: Synthetic oligonucleotide"
agcagagcaggaacaacaaca

SEQ ID NO: 39311 - DNA, 21 bp, Artificial Sequence
  source: /note="Description of Artificial Sequence: Synthetic oligonucleotide"
agcagagcaatcctcgcagac

SEQ ID NO: 39312 - DNA, 21 bp, Artificial Sequence
  source: /note="Description of Artificial Sequence: Synthetic oligonucleotide"
agcagagcactcacaggacca

SEQ ID NO: 39313 - DNA, 21 bp, Artificial Sequence
  source: /note="Description of Artificial Sequence: Synthetic oligonucleotide"
agcagagcactcgtcagcgca

SEQ ID NO: 39314 - DNA, 21 bp, Artificial Sequence
  source: /note="Description of Artificial Sequence: Synthetic oligonucleotide"
agcagagcaaacctccacagc

SEQ ID NO: 39315 - DNA, 21 bp, Artificial Sequence
  source: /note="Description of Artificial Sequence: Synthetic oligonucleotide"
agcagagcaccaagcctccca

SEQ ID NO: 39316 - DNA, 21 bp, Artificial Sequence
  source: /note="Description of Artificial Sequence: Synthetic oligonucleotide"
agcagagcaagcatggcagtc

SEQ ID NO: 39317 - DNA, 21 bp, Artificial Sequence
  source: /note="Description of Artificial Sequence: Synthetic oligonucleotide"
agcagagcagtcagcgacgca

SEQ ID NO: 39318 - DNA, 21 bp, Artificial Sequence
  source: /note="Description of Artificial Sequence: Synthetic oligonucleotide"
agcagagacgcaatccacgac

SEQ ID NO: 39319 - DNA, 21 bp, Artificial Sequence
  source: /note="Description of Artificial Sequence: Synthetic oligonucleotide"
agcagagacgcaaaacaaagc

SEQ ID NO: 39320 - DNA, 21 bp, Artificial Sequence
  source: /note="Description of Artificial Sequence: Synthetic oligonucleotide"
agcagagacctcctcagccca

SEQ ID NO: 39321 - DNA, 21 bp, Artificial Sequence
  source: /note="Description of Artificial Sequence: Synthetic oligonucleotide"
agcagagacatgacaaacttc

SEQ ID NO: 39322 - DNA, 21 bp, Artificial Sequence
  source: /note="Description of Artificial Sequence: Synthetic oligonucleotide"
agcagagacaaccaaacagtc

SEQ ID NO: 39323 - DNA, 21 bp, Artificial Sequence
  source: /note="Description of Artificial Sequence: Synthetic oligonucleotide"
agcagagacagaacactcaac

SEQ ID NO: 39324 - DNA, 21 bp, Artificial Sequence
  source: /note="Description of Artificial Sequence: Synthetic oligonucleotide"
agcagagacagcggaacaagc

SEQ ID NO: 39325 - DNA, 21 bp, Artificial Sequence
  source: /note="Description of Artificial Sequence: Synthetic oligonucleotide"
agcagagacagccaaagagaa

SEQ ID NO: 39326 - DNA, 21 bp, Artificial Sequence
  source: /note="Description of Artificial Sequence: Synthetic oligonucleotide"
agcagagacacaggacacaca

SEQ ID NO: 39327 - DNA, 21 bp, Artificial Sequence
  source: /note="Description of Artificial Sequence: Synthetic oligonucleotide"
agcagagacacaagccaccac

SEQ ID NO: 39328 - DNA, 21 bp, Artificial Sequence
  source: /note="Description of Artificial Sequence: Synthetic oligonucleotide"
agcagagacgtcccacaaaac

SEQ ID NO: 39329 - DNA, 21 bp, Artificial Sequence
  source: /note="Description of Artificial Sequence: Synthetic oligonucleotide"
agcagagactaccaactcaac

SEQ ID NO: 39330 - DNA, 21 bp, Artificial Sequence
  source: /note="Description of Artificial Sequence: Synthetic oligonucleotide"
agcagagaaaaagtcagcgca

SEQ ID NO: 39331 - DNA, 21 bp, Artificial Sequence
  source: /note="Description of Artificial Sequence: Synthetic oligonucleotide"
agcagagaactcagcagactc

SEQ ID NO: 39332 - DNA, 21 bp, Artificial Sequence
  source: /note="Description of Artificial Sequence: Synthetic oligonucleotide"
agcagagaaatggcaccaagc

SEQ ID NO: 39333 - DNA, 21 bp, Artificial Sequence
  source: /note="Description of Artificial Sequence: Synthetic oligonucleotide"
agcagagaaccagcaaacatc

SEQ ID NO: 39334 - DNA, 21 bp, Artificial Sequence
  source: /note="Description of Artificial Sequence: Synthetic oligonucleotide"
agcagagaacaactcagcgga

SEQ ID NO: 39335 - DNA, 21 bp, Artificial Sequence
  source: /note="Description of Artificial Sequence: Synthetic oligonucleotide"
agcagagaaagcagattcgac

SEQ ID NO: 39336 - DNA, 21 bp, Artificial Sequence
  source: /note="Description of Artificial Sequence: Synthetic oligonucleotide"
agcagagaaagctaccaacaa

SEQ ID NO: 39337 - DNA, 21 bp, Artificial Sequence
  source: /note="Description of Artificial Sequence: Synthetic oligonucleotide"
agcagagaaacaagagcagtc

SEQ ID NO: 39338 - DNA, 21 bp, Artificial Sequence
  source: /note="Description of Artificial Sequence: Synthetic oligonucleotide"
agcagagaagtcgacaaaaca

SEQ ID NO: 39339 - DNA, 21 bp, Artificial Sequence
  source: /note="Description of Artificial Sequence: Synthetic oligonucleotide"
agcagagaagtcgtcgcaagc

SEQ ID NO: 39340 - DNA, 21 bp, Artificial Sequence
  source: /note="Description of Artificial Sequence: Synthetic oligonucleotide"
agcagattcgaagcaaacaca

SEQ ID NO: 39341 - DNA, 21 bp, Artificial Sequence
  source: /note="Description of Artificial Sequence: Synthetic oligonucleotide"
agcagattcgaacaactcgga

SEQ ID NO: 39342 - DNA, 21 bp, Artificial Sequence
  source: /note="Description of Artificial Sequence: Synthetic oligonucleotide"
agcagattccacccaacagaa

SEQ ID NO: 39343 - DNA, 21 bp, Artificial Sequence
  source: /note="Description of Artificial Sequence: Synthetic oligonucleotide"
agcagattccaaggaagcgga

SEQ ID NO: 39344 - DNA, 21 bp, Artificial Sequence
  source: /note="Description of Artificial Sequence: Synthetic oligonucleotide"
agcagattcacaacacaagtc

SEQ ID NO: 39345 - DNA, 21 bp, Artificial Sequence
  source: /note="Description of Artificial Sequence: Synthetic oligonucleotide"
agcagaggagacccactcttc

SEQ ID NO: 39346 - DNA, 21 bp, Artificial Sequence
  source: /note="Description of Artificial Sequence: Synthetic oligonucleotide"
agcagaggagacagaccaatg

SEQ ID NO: 39347 - DNA, 21 bp, Artificial Sequence
  source: /note="Description of Artificial Sequence: Synthetic oligonucleotide"
agcagaggagacacaatggtc

SEQ ID NO: 39348 - DNA, 21 bp, Artificial Sequence
  source: /note="Description of Artificial Sequence: Synthetic oligonucleotide"
agcagaggagaacactacgtc

SEQ ID NO: 39349 - DNA, 21 bp, Artificial Sequence
  source: /note="Description of Artificial Sequence: Synthetic oligonucleotide"
agcagaggacacgaaacaagc

SEQ ID NO: 39350 - DNA, 21 bp, Artificial Sequence
  source: /note="Description of Artificial Sequence: Synthetic oligonucleotide"
agcagaggaaaagaagtcatc

SEQ ID NO: 39351 - DNA, 21 bp, Artificial Sequence
  source: /note="Description of Artificial Sequence: Synthetic oligonucleotide"
agcagaggaagcgaaagcatc

SEQ ID NO: 39352 - DNA, 21 bp, Artificial Sequence
  source: /note="Description of Artificial Sequence: Synthetic oligonucleotide"
agcagaggagtcgacaacctc

SEQ ID NO: 39353 - DNA, 21 bp, Artificial Sequence
  source: /note="Description of Artificial Sequence: Synthetic oligonucleotide"
agcagaggagtcagcagccca

SEQ ID NO: 39354 - DNA, 21 bp, Artificial Sequence
  source: /note="Description of Artificial Sequence: Synthetic oligonucleotide"
agcagacacccagtcccacac

SEQ ID NO: 39355 - DNA, 21 bp, Artificial Sequence
  source: /note="Description of Artificial Sequence: Synthetic oligonucleotide"
agcagacaccaagcaacaagc

SEQ ID NO: 39356 - DNA, 21 bp, Artificial Sequence
  source: /note="Description of Artificial Sequence: Synthetic oligonucleotide"
agcagacacacaagcctcagc

SEQ ID NO: 39357 - DNA, 21 bp, Artificial Sequence
  source: /note="Description of Artificial Sequence: Synthetic oligonucleotide"
agcagacactacacaacagaa

SEQ ID NO: 39358 - DNA, 21 bp, Artificial Sequence
  source: /note="Description of Artificial Sequence: Synthetic oligonucleotide"
agcagaatcgcagaaccaaaa

SEQ ID NO: 39359 - DNA, 21 bp, Artificial Sequence
  source: /note="Description of Artificial Sequence: Synthetic oligonucleotide"
agcagaatcggaatcagcgca

SEQ ID NO: 39360 - DNA, 21 bp, Artificial Sequence
  source: /note="Description of Artificial Sequence: Synthetic oligonucleotide"
agcagaatcctcagactcgac

SEQ ID NO: 39361 - DNA, 21 bp, Artificial Sequence
  source: /note="Description of Artificial Sequence: Synthetic oligonucleotide"
agcagactcggaggacacagc

SEQ ID NO: 39362 - DNA, 21 bp, Artificial Sequence
  source: /note="Description of Artificial Sequence: Synthetic oligonucleotide"
agcagactcccaacacaagac

SEQ ID NO: 39363 - DNA, 21 bp, Artificial Sequence
  source: /note="Description of Artificial Sequence: Synthetic oligonucleotide"
agcagactcccatacccaaac

SEQ ID NO: 39364 - DNA, 21 bp, Artificial Sequence
  source: /note="Description of Artificial Sequence: Synthetic oligonucleotide"
agcagactcagcggagcagaa

SEQ ID NO: 39365 - DNA, 21 bp, Artificial Sequence
  source: /note="Description of Artificial Sequence: Synthetic oligonucleotide"
agcagactcagccacgaactc

SEQ ID NO: 39366 - DNA, 21 bp, Artificial Sequence
  source: /note="Description of Artificial Sequence: Synthetic oligonucleotide"
agcagactcacaccaccaagc

SEQ ID NO: 39367 - DNA, 21 bp, Artificial Sequence
  source: /note="Description of Artificial Sequence: Synthetic oligonucleotide"
agcagactcacaccataccca

SEQ ID NO: 39368 - DNA, 21 bp, Artificial Sequence
  source: /note="Description of Artificial Sequence: Synthetic oligonucleotide"
agcagactcgtcccagtcgca

SEQ ID NO: 39369 - DNA, 21 bp, Artificial Sequence
  source: /note="Description of Artificial Sequence: Synthetic oligonucleotide"
agcagaatggcaatcagcgac

SEQ ID NO: 39370 - DNA, 21 bp, Artificial Sequence
  source: /note="Description of Artificial Sequence: Synthetic oligonucleotide"
agcagaatgggacaaacaagc

SEQ ID NO: 39371 - DNA, 21 bp, Artificial Sequence
  source: /note="Description of Artificial Sequence: Synthetic oligonucleotide"
agcagaatgagcttcgcacca

SEQ ID NO: 39372 - DNA, 21 bp, Artificial Sequence
  source: /note="Description of Artificial Sequence: Synthetic oligonucleotide"
agcagaatgagccaaggattc

SEQ ID NO: 39373 - DNA, 21 bp, Artificial Sequence
  source: /note="Description of Artificial Sequence: Synthetic oligonucleotide"
agcagaaacagcctcgcactc

SEQ ID NO: 39374 - DNA, 21 bp, Artificial Sequence
  source: /note="Description of Artificial Sequence: Synthetic oligonucleotide"
agcagaaacagcctcctcgac

SEQ ID NO: 39375 - DNA, 21 bp, Artificial Sequence
  source: /note="Description of Artificial Sequence: Synthetic oligonucleotide"
agcagaaacacaaacacagac

SEQ ID NO: 39376 - DNA, 21 bp, Artificial Sequence
  source: /note="Description of Artificial Sequence: Synthetic oligonucleotide"
agcagaaacacaccagtcgac

SEQ ID NO: 39377 - DNA, 21 bp, Artificial Sequence
  source: /note="Description of Artificial Sequence: Synthetic oligonucleotide"
agcagaccagcaatcggaagc

SEQ ID NO: 39378 - DNA, 21 bp, Artificial Sequence
  source: /note="Description of Artificial Sequence: Synthetic oligonucleotide"
agcagaccagcaccagtcctc

SEQ ID NO: 39379 - DNA, 21 bp, Artificial Sequence
  source: /note="Description of Artificial Sequence: Synthetic oligonucleotide"
agcagaccagcaacaaaccca

SEQ ID NO: 39380 - DNA, 21 bp, Artificial Sequence
  source: /note="Description of Artificial Sequence: Synthetic oligonucleotide"
agcagaccagaaccaccatac

SEQ ID NO: 39381 - DNA, 21 bp, Artificial Sequence
  source: /note="Description of Artificial Sequence: Synthetic oligonucleotide"
agcagaccaggattccaaaac

SEQ ID NO: 39382 - DNA, 21 bp, Artificial Sequence
  source: /note="Description of Artificial Sequence: Synthetic oligonucleotide"
agcagaccaggactcacattc

SEQ ID NO: 39383 - DNA, 21 bp, Artificial Sequence
  source: /note="Description of Artificial Sequence: Synthetic oligonucleotide"
agcagaccaatcacaccactc

SEQ ID NO: 39384 - DNA, 21 bp, Artificial Sequence
  source: /note="Description of Artificial Sequence: Synthetic oligonucleotide"
agcagaccaatgagcctcgaa

SEQ ID NO: 39385 - DNA, 21 bp, Artificial Sequence
  source: /note="Description of Artificial Sequence: Synthetic oligonucleotide"
agcagaccaagagacacagac

SEQ ID NO: 39386 - DNA, 21 bp, Artificial Sequence
  source: /note="Description of Artificial Sequence: Synthetic oligonucleotide"
agcagaccaagcgcataccaa

SEQ ID NO: 39387 - DNA, 21 bp, Artificial Sequence
  source: /note="Description of Artificial Sequence: Synthetic oligonucleotide"
agcagaccaagcgacgtctgg

SEQ ID NO: 39388 - DNA, 21 bp, Artificial Sequence
  source: /note="Description of Artificial Sequence: Synthetic oligonucleotide"
agcagaccaagcaacgacgca

SEQ ID NO: 39389 - DNA, 21 bp, Artificial Sequence
  source: /note="Description of Artificial Sequence: Synthetic oligonucleotide"
agcagaccaagcagcgaaagc

SEQ ID NO: 39390 - DNA, 21 bp, Artificial Sequence
  source: /note="Description of Artificial Sequence: Synthetic oligonucleotide"
agcagaccaacagcacaagaa

SEQ ID NO: 39391 - DNA, 21 bp, Artificial Sequence
  source: /note="Description of Artificial Sequence: Synthetic oligonucleotide"
agcagaccaacaagcgcaagc

SEQ ID NO: 39392 - DNA, 21 bp, Artificial Sequence
  source: /note="Description of Artificial Sequence: Synthetic oligonucleotide"
agcagaccagtcgtcagcagc

SEQ ID NO: 39393 - DNA, 21 bp, Artificial Sequence
  source: /note="Description of Artificial Sequence: Synthetic oligonucleotide"
agcagacaagcactcagcgac

SEQ ID NO: 39394 - DNA, 21 bp, Artificial Sequence
  source: /note="Description of Artificial Sequence: Synthetic oligonucleotide"
agcagacaagaccactggcca

SEQ ID NO: 39395 - DNA, 21 bp, Artificial Sequence
  source: /note="Description of Artificial Sequence: Synthetic oligonucleotide"
agcagacaagacccagtcatc

SEQ ID NO: 39396 - DNA, 21 bp, Artificial Sequence
  source: /note="Description of Artificial Sequence: Synthetic oligonucleotide"
agcagacaactcgcaccaagc

SEQ ID NO: 39397 - DNA, 21 bp, Artificial Sequence
  source: /note="Description of Artificial Sequence: Synthetic oligonucleotide"
agcagacaaatggaacacgtc

SEQ ID NO: 39398 - DNA, 21 bp, Artificial Sequence
  source: /note="Description of Artificial Sequence: Synthetic oligonucleotide"
agcagacaacaagaaagagga

SEQ ID NO: 39399 - DNA, 21 bp, Artificial Sequence
  source: /note="Description of Artificial Sequence: Synthetic oligonucleotide"
agcagacaacaaacaccagac

SEQ ID NO: 39400 - DNA, 21 bp, Artificial Sequence
  source: /note="Description of Artificial Sequence: Synthetic oligonucleotide"
agcagacaaagcccaagcctc

SEQ ID NO: 39401 - DNA, 21 bp, Artificial Sequence
  source: /note="Description of Artificial Sequence: Synthetic oligonucleotide"
agcagacaaagcgtccacgga

SEQ ID NO: 39402 - DNA, 21 bp, Artificial Sequence
  source: /note="Description of Artificial Sequence: Synthetic oligonucleotide"
agcagaagaccaagcgacatc

SEQ ID NO: 39403 - DNA, 21 bp, Artificial Sequence
  source: /note="Description of Artificial Sequence: Synthetic oligonucleotide"
agcagaagcgcactcacagac

SEQ ID NO: 39404 - DNA, 21 bp, Artificial Sequence
  source: /note="Description of Artificial Sequence: Synthetic oligonucleotide"
agcagaagcgaaagaatgcca

SEQ ID NO: 39405 - DNA, 21 bp, Artificial Sequence
  source: /note="Description of Artificial Sequence: Synthetic oligonucleotide"
agcagaagcggacaaggagac

SEQ ID NO: 39406 - DNA, 21 bp, Artificial Sequence
  source: /note="Description of Artificial Sequence: Synthetic oligonucleotide"
agcagaagcggaagcctccca

SEQ ID NO: 39407 - DNA, 21 bp, Artificial Sequence
  source: /note="Description of Artificial Sequence: Synthetic oligonucleotide"
agcagaagcggaacaccattc

SEQ ID NO: 39408 - DNA, 21 bp, Artificial Sequence
  source: /note="Description of Artificial Sequence: Synthetic oligonucleotide"
agcagaagccacccaagccaa

SEQ ID NO: 39409 - DNA, 21 bp, Artificial Sequence
  source: /note="Description of Artificial Sequence: Synthetic oligonucleotide"
agcagaagcatcatgcaagga

SEQ ID NO: 39410 - DNA, 21 bp, Artificial Sequence
  source: /note="Description of Artificial Sequence: Synthetic oligonucleotide"
agcagaagcatcagcacagac

SEQ ID NO: 39411 - DNA, 21 bp, Artificial Sequence
  source: /note="Description of Artificial Sequence: Synthetic oligonucleotide"
agcagaagcctcgaaagcaca

SEQ ID NO: 39412 - DNA, 21 bp, Artificial Sequence
  source: /note="Description of Artificial Sequence: Synthetic oligonucleotide"
agcagaagcctcggaacaaac

SEQ ID NO: 39413 - DNA, 21 bp, Artificial Sequence
  source: /note="Description of Artificial Sequence: Synthetic oligonucleotide"
agcagaagcctccacctcgtc

SEQ ID NO: 39414 - DNA, 21 bp, Artificial Sequence
  source: /note="Description of Artificial Sequence: Synthetic oligonucleotide"
agcagaagcctcagaccagac

SEQ ID NO: 39415 - DNA, 21 bp, Artificial Sequence
  source: /note="Description of Artificial Sequence: Synthetic oligonucleotide"
agcagaagcaacgcaaacatc

SEQ ID NO: 39416 - DNA, 21 bp, Artificial Sequence
  source: /note="Description of Artificial Sequence: Synthetic oligonucleotide"
agcagaagcaacggagtcatc

SEQ ID NO: 39417 - DNA, 21 bp, Artificial Sequence
  source: /note="Description of Artificial Sequence: Synthetic oligonucleotide"
agcagaagcccaggagtccac

SEQ ID NO: 39418 - DNA, 21 bp, Artificial Sequence
  source: /note="Description of Artificial Sequence: Synthetic oligonucleotide"
agcagaagcccaatgcaacca

SEQ ID NO: 39419 - DNA, 21 bp, Artificial Sequence
  source: /note="Description of Artificial Sequence: Synthetic oligonucleotide"
agcagaagcccaccactccca

SEQ ID NO: 39420 - DNA, 21 bp, Artificial Sequence
  source: /note="Description of Artificial Sequence: Synthetic oligonucleotide"
agcagaagcccaccaatgaca

SEQ ID NO: 39421 - DNA, 21 bp, Artificial Sequence
  source: /note="Description of Artificial Sequence: Synthetic oligonucleotide"
agcagaagcagaacagaaaca

SEQ ID NO: 39422 - DNA, 21 bp, Artificial Sequence
  source: /note="Description of Artificial Sequence: Synthetic oligonucleotide"
agcagaagcagcggaggaaac

SEQ ID NO: 39423 - DNA, 21 bp, Artificial Sequence
  source: /note="Description of Artificial Sequence: Synthetic oligonucleotide"
agcagaagcagcggaggaagc

SEQ ID NO: 39424 - DNA, 21 bp, Artificial Sequence
  source: /note="Description of Artificial Sequence: Synthetic oligonucleotide"
agcagaagcgtcagcggaaca

SEQ ID NO: 39425 - DNA, 21 bp, Artificial Sequence
  source: /note="Description of Artificial Sequence: Synthetic oligonucleotide"
agcagaagcgtcagcctcagc

SEQ ID NO: 39426 - DNA, 21 bp, Artificial Sequence
  source: /note="Description of Artificial Sequence: Synthetic oligonucleotide"
agcagaacagcaaacgcagca

SEQ ID NO: 39427 - DNA, 21 bp, Artificial Sequence
  source: /note="Description of Artificial Sequence: Synthetic oligonucleotide"
agcagaacagcaagcttccca

SEQ ID NO: 39428 - DNA, 21 bp, Artificial Sequence
  source: /note="Description of Artificial Sequence: Synthetic oligonucleotide"
agcagaacagcaagcagcgga

SEQ ID NO: 39429 - DNA, 21 bp, Artificial Sequence
  source: /note="Description of Artificial Sequence: Synthetic oligonucleotide"
agcagaacagacacaatcaaa

SEQ ID NO: 39430 - DNA, 21 bp, Artificial Sequence
  source: /note="Description of Artificial Sequence: Synthetic oligonucleotide"
agcagaacagaagcactcgga

SEQ ID NO: 39431 - DNA, 21 bp, Artificial Sequence
  source: /note="Description of Artificial Sequence: Synthetic oligonucleotide"
agcagaacagaaagaagcgca

SEQ ID NO: 39432 - DNA, 21 bp, Artificial Sequence
  source: /note="Description of Artificial Sequence: Synthetic oligonucleotide"
agcagaacaggagcataccca

SEQ ID NO: 39433 - DNA, 21 bp, Artificial Sequence
  source: /note="Description of Artificial Sequence: Synthetic oligonucleotide"
agcagaacaggaagcacactc

SEQ ID NO: 39434 - DNA, 21 bp, Artificial Sequence
  source: /note="Description of Artificial Sequence: Synthetic oligonucleotide"
agcagaacacacgaccaagca

SEQ ID NO: 39435 - DNA, 21 bp, Artificial Sequence
  source: /note="Description of Artificial Sequence: Synthetic oligonucleotide"
agcagaacactcgtcggagaa

SEQ ID NO: 39436 - DNA, 21 bp, Artificial Sequence
  source: /note="Description of Artificial Sequence: Synthetic oligonucleotide"
agcagaacaccacacatcgac

SEQ ID NO: 39437 - DNA, 21 bp, Artificial Sequence
  source: /note="Description of Artificial Sequence: Synthetic oligonucleotide"
agcagaacaccaatgagcatg

SEQ ID NO: 39438 - DNA, 21 bp, Artificial Sequence
  source: /note="Description of Artificial Sequence: Synthetic oligonucleotide"
agcagaacaagcatgccaagc

SEQ ID NO: 39439 - DNA, 21 bp, Artificial Sequence
  source: /note="Description of Artificial Sequence: Synthetic oligonucleotide"
agcagaacaagcagactcgac

SEQ ID NO: 39440 - DNA, 21 bp, Artificial Sequence
  source: /note="Description of Artificial Sequence: Synthetic oligonucleotide"
agcagaacagtcgcaagcgga

SEQ ID NO: 39441 - DNA, 21 bp, Artificial Sequence
  source: /note="Description of Artificial Sequence: Synthetic oligonucleotide"
agcagaacagtccaagcaatg

SEQ ID NO: 39442 - DNA, 21 bp, Artificial Sequence
  source: /note="Description of Artificial Sequence: Synthetic oligonucleotide"
agcagagtcgcaacaacactc

SEQ ID NO: 39443 - DNA, 21 bp, Artificial Sequence
  source: /note="Description of Artificial Sequence: Synthetic oligonucleotide"
agcagagtcatccacgtcagc

SEQ ID NO: 39444 - DNA, 21 bp, Artificial Sequence
  source: /note="Description of Artificial Sequence: Synthetic oligonucleotide"
agcagagtcaacgcaccaagc

SEQ ID NO: 39445 - DNA, 21 bp, Artificial Sequence
  source: /note="Description of Artificial Sequence: Synthetic oligonucleotide"
agcagagtcaacgcacaagca

SEQ ID NO: 39446 - DNA, 21 bp, Artificial Sequence
  source: /note="Description of Artificial Sequence: Synthetic oligonucleotide"
agcagagtcccacacagcgac

SEQ ID NO: 39447 - DNA, 21 bp, Artificial Sequence
  source: /note="Description of Artificial Sequence: Synthetic oligonucleotide"
agcagagtcccaaacctcagc

SEQ ID NO: 39448 - DNA, 21 bp, Artificial Sequence
  source: /note="Description of Artificial Sequence: Synthetic oligonucleotide"
agcagagtccaaaacggagtc

SEQ ID NO: 39449 - DNA, 21 bp, Artificial Sequence
  source: /note="Description of Artificial Sequence: Synthetic oligonucleotide"
agcagagtcagcgcagtcatg

SEQ ID NO: 39450 - DNA, 21 bp, Artificial Sequence
  source: /note="Description of Artificial Sequence: Synthetic oligonucleotide"
agcagagtcagcggacaaagc

SEQ ID NO: 39451 - DNA, 21 bp, Artificial Sequence
  source: /note="Description of Artificial Sequence: Synthetic oligonucleotide"
agcagagtcagccaagtcatg

SEQ ID NO: 39452 - DNA, 21 bp, Artificial Sequence
  source: /note="Description of Artificial Sequence: Synthetic oligonucleotide"
agcagatgggtcacaatcgaa

SEQ ID NO: 39453 - DNA, 21 bp, Artificial Sequence
  source: /note="Description of Artificial Sequence: Synthetic oligonucleotide"
agcagatacgcaacaagcgga

SEQ ID NO: 39454 - DNA, 21 bp, Artificial Sequence
  source: /note="Description of Artificial Sequence: Synthetic oligonucleotide"
agcagatacgaagacccagaa

SEQ ID NO: 39455 - DNA, 21 bp, Artificial Sequence
  source: /note="Description of Artificial Sequence: Synthetic oligonucleotide"
agcagatacggaagcgacagc

SEQ ID NO: 39456 - DNA, 21 bp, Artificial Sequence
  source: /note="Description of Artificial Sequence: Synthetic oligonucleotide"
agcagatacaacggaatggga

SEQ ID NO: 39457 - DNA, 21 bp, Artificial Sequence
  source: /note="Description of Artificial Sequence: Synthetic oligonucleotide"
agcagatacccagaagcaaca

SEQ ID NO: 39458 - DNA, 21 bp, Artificial Sequence
  source: /note="Description of Artificial Sequence: Synthetic oligonucleotide"
agcagcgcatgcatcaaagca

SEQ ID NO: 39459 - DNA, 21 bp, Artificial Sequence
  source: /note="Description of Artificial Sequence: Synthetic oligonucleotide"
agcagcgcagaagcaagactc

SEQ ID NO: 39460 - DNA, 21 bp, Artificial Sequence
  source: /note="Description of Artificial Sequence: Synthetic oligonucleotide"
agcagcgcaggagcaccactc

SEQ ID NO: 39461 - DNA, 21 bp, Artificial Sequence
  source: /note="Description of Artificial Sequence: Synthetic oligonucleotide"
agcagcgcaggatgggtcgga

SEQ ID NO: 39462 - DNA, 21 bp, Artificial Sequence
  source: /note="Description of Artificial Sequence: Synthetic oligonucleotide"
agcagcgcaatcccaatgaaa

SEQ ID NO: 39463 - DNA, 21 bp, Artificial Sequence
  source: /note="Description of Artificial Sequence: Synthetic oligonucleotide"
agcagcgcaaacgcaccaaga

SEQ ID NO: 39464 - DNA, 21 bp, Artificial Sequence
  source: /note="Description of Artificial Sequence: Synthetic oligonucleotide"
agcagcgcaaacgcaagcaca

SEQ ID NO: 39465 - DNA, 21 bp, Artificial Sequence
  source: /note="Description of Artificial Sequence: Synthetic oligonucleotide"
agcagcgcaccagtcagccca

SEQ ID NO: 39466 - DNA, 21 bp, Artificial Sequence
  source: /note="Description of Artificial Sequence: Synthetic oligonucleotide"
agcagcgcacaagtcagcgtc

SEQ ID NO: 39467 - DNA, 21 bp, Artificial Sequence
  source: /note="Description of Artificial Sequence: Synthetic oligonucleotide"
agcagcgcaacaatgacaaca

SEQ ID NO: 39468 - DNA, 21 bp, Artificial Sequence
  source: /note="Description of Artificial Sequence: Synthetic oligonucleotide"
agcagcgacgcaagcagaaga

SEQ ID NO: 39469 - DNA, 21 bp, Artificial Sequence
  source: /note="Description of Artificial Sequence: Synthetic oligonucleotide"
agcagcgaccacggactcaaa

SEQ ID NO: 39470 - DNA, 21 bp, Artificial Sequence
  source: /note="Description of Artificial Sequence: Synthetic oligonucleotide"
agcagcgaccacatcggatgc

SEQ ID NO: 39471 - DNA, 21 bp, Artificial Sequence
  source: /note="Description of Artificial Sequence: Synthetic oligonucleotide"
agcagcgacatcagaccaagc

SEQ ID NO: 39472 - DNA, 21 bp, Artificial Sequence
  source: /note="Description of Artificial Sequence: Synthetic oligonucleotide"
agcagcgacagcgtcaaacac

SEQ ID NO: 39473 - DNA, 21 bp, Artificial Sequence
  source: /note="Description of Artificial Sequence: Synthetic oligonucleotide"
agcagcgacacaagcccagga

SEQ ID NO: 39474 - DNA, 21 bp, Artificial Sequence
  source: /note="Description of Artificial Sequence: Synthetic oligonucleotide"
agcagcgacacagtcacagaa

SEQ ID NO: 39475 - DNA, 21 bp, Artificial Sequence
  source: /note="Description of Artificial Sequence: Synthetic oligonucleotide"
agcagcgaagcagcaagagga

SEQ ID NO: 39476 - DNA, 21 bp, Artificial Sequence
  source: /note="Description of Artificial Sequence: Synthetic oligonucleotide"
agcagcgaagacgtcggattc

SEQ ID NO: 39477 - DNA, 21 bp, Artificial Sequence
  source: /note="Description of Artificial Sequence: Synthetic oligonucleotide"
agcagcgaacacggaagaaac

SEQ ID NO: 39478 - DNA, 21 bp, Artificial Sequence
  source: /note="Description of Artificial Sequence: Synthetic oligonucleotide"
agcagcgaaaaacacagccca

SEQ ID NO: 39479 - DNA, 21 bp, Artificial Sequence
  source: /note="Description of Artificial Sequence: Synthetic oligonucleotide"
agcagcgaaaaaagaccagga

SEQ ID NO: 39480 - DNA, 21 bp, Artificial Sequence
  source: /note="Description of Artificial Sequence: Synthetic oligonucleotide"
agcagcgaaatgagcggaaac

SEQ ID NO: 39481 - DNA, 21 bp, Artificial Sequence
  source: /note="Description of Artificial Sequence: Synthetic oligonucleotide"
agcagcgaaagagcacacgga

SEQ ID NO: 39482 - DNA, 21 bp, Artificial Sequence
  source: /note="Description of Artificial Sequence: Synthetic oligonucleotide"
agcagcgaaagagcaagcagc

SEQ ID NO: 39483 - DNA, 21 bp, Artificial Sequence
  source: /note="Description of Artificial Sequence: Synthetic oligonucleotide"
agcagcgaaagcctcggaaga

SEQ ID NO: 39484 - DNA, 21 bp, Artificial Sequence
  source: /note="Description of Artificial Sequence: Synthetic oligonucleotide"
agcagcgaaagcagatggatc

SEQ ID NO: 39485 - DNA, 21 bp, Artificial Sequence
  source: /note="Description of Artificial Sequence: Synthetic oligonucleotide"
agcagcttcgcagtcggagga

SEQ ID NO: 39486 - DNA, 21 bp, Artificial Sequence
  source: /note="Description of Artificial Sequence: Synthetic oligonucleotide"
agcagcttcgacagaggagca

SEQ ID NO: 39487 - DNA, 21 bp, Artificial Sequence
  source: /note="Description of Artificial Sequence: Synthetic oligonucleotide"
agcagcttcaaaggaacattc

SEQ ID NO: 39488 - DNA, 21 bp, Artificial Sequence
  source: /note="Description of Artificial Sequence: Synthetic oligonucleotide"
agcagcttcctcacaccaagc

SEQ ID NO: 39489 - DNA, 21 bp, Artificial Sequence
  source: /note="Description of Artificial Sequence: Synthetic oligonucleotide"
agcagcttcccaagcaaagca

SEQ ID NO: 39490 - DNA, 21 bp, Artificial Sequence
  source: /note="Description of Artificial Sequence: Synthetic oligonucleotide"
agcagcttcagaacaccactc

SEQ ID NO: 39491 - DNA, 21 bp, Artificial Sequence
  source: /note="Description of Artificial Sequence: Synthetic oligonucleotide"
agcagcggagcaagcagccca

SEQ ID NO: 39492 - DNA, 21 bp, Artificial Sequence
  source: /note="Description of Artificial Sequence: Synthetic oligonucleotide"
agcagcggagacagaagccac

SEQ ID NO: 39493 - DNA, 21 bp, Artificial Sequence
  source: /note="Description of Artificial Sequence: Synthetic oligonucleotide"
agcagcggagaaggatacaaa

SEQ ID NO: 39494 - DNA, 21 bp, Artificial Sequence
  source: /note="Description of Artificial Sequence: Synthetic oligonucleotide"
agcagcggattcggaaaacca

SEQ ID NO: 39495 - DNA, 21 bp, Artificial Sequence
  source: /note="Description of Artificial Sequence: Synthetic oligonucleotide"
agcagcggaatcggacacttc

SEQ ID NO: 39496 - DNA, 21 bp, Artificial Sequence
  source: /note="Description of Artificial Sequence: Synthetic oligonucleotide"
agcagcggactcgcaagagca

SEQ ID NO: 39497 - DNA, 21 bp, Artificial Sequence
  source: /note="Description of Artificial Sequence: Synthetic oligonucleotide"
agcagcggactcatcagcgtc

SEQ ID NO: 39498 - DNA, 21 bp, Artificial Sequence
  source: /note="Description of Artificial Sequence: Synthetic oligonucleotide"
agcagcggaaacaacctccac

SEQ ID NO: 39499 - DNA, 21 bp, Artificial Sequence
  source: /note="Description of Artificial Sequence: Synthetic oligonucleotide"
agcagcggaccaagcctcgca

SEQ ID NO: 39500 - DNA, 21 bp, Artificial Sequence
  source: /note="Description of Artificial Sequence: Synthetic oligonucleotide"
agcagcggacaagtcagacaa

SEQ ID NO: 39501 - DNA, 21 bp, Artificial Sequence
  source: /note="Description of Artificial Sequence: Synthetic oligonucleotide"
agcagcggaagaccagtcgca

SEQ ID NO: 39502 - DNA, 21 bp, Artificial Sequence
  source: /note="Description of Artificial Sequence: Synthetic oligonucleotide"
agcagcggaacaatgagctac

SEQ ID NO: 39503 - DNA, 21 bp, Artificial Sequence
  source: /note="Description of Artificial Sequence: Synthetic oligonucleotide"
agcagccacttcagagcagac

SEQ ID NO: 39504 - DNA, 21 bp, Artificial Sequence
  source: /note="Description of Artificial Sequence: Synthetic oligonucleotide"
agcagccacttcgtcgtcaca

SEQ ID NO: 39505 - DNA, 21 bp, Artificial Sequence
  source: /note="Description of Artificial Sequence: Synthetic oligonucleotide"
agcagccaccaccaattccca

SEQ ID NO: 39506 - DNA, 21 bp, Artificial Sequence
  source: /note="Description of Artificial Sequence: Synthetic oligonucleotide"
agcagccacaaagtcgcatgg

SEQ ID NO: 39507 - DNA, 21 bp, Artificial Sequence
  source: /note="Description of Artificial Sequence: Synthetic oligonucleotide"
agcagccacatgagcccatgg

SEQ ID NO: 39508 - DNA, 21 bp, Artificial Sequence
  source: /note="Description of Artificial Sequence: Synthetic oligonucleotide"
agcagccacccaagcagaatc

SEQ ID NO: 39509 - DNA, 21 bp, Artificial Sequence
  source: /note="Description of Artificial Sequence: Synthetic oligonucleotide"
agcagccaccaagaaaaactc

SEQ ID NO: 39510 - DNA, 21 bp, Artificial Sequence
  source: /note="Description of Artificial Sequence: Synthetic oligonucleotide"
agcagccacagagcactcgtc

SEQ ID NO: 39511 - DNA, 21 bp, Artificial Sequence
  source: /note="Description of Artificial Sequence: Synthetic oligonucleotide"
agcagccacagcctctacaca

SEQ ID NO: 39512 - DNA, 21 bp, Artificial Sequence
  source: /note="Description of Artificial Sequence: Synthetic oligonucleotide"
agcagccacagctacgtcaca

SEQ ID NO: 39513 - DNA, 21 bp, Artificial Sequence
  source: /note="Description of Artificial Sequence: Synthetic oligonucleotide"
agcagccacgtcacaggatac

SEQ ID NO: 39514 - DNA, 21 bp, Artificial Sequence
  source: /note="Description of Artificial Sequence: Synthetic oligonucleotide"
agcagcatccacaacgcagtc

SEQ ID NO: 39515 - DNA, 21 bp, Artificial Sequence
  source: /note="Description of Artificial Sequence: Synthetic oligonucleotide"
agcagcatcatcctcggagac

SEQ ID NO: 39516 - DNA, 21 bp, Artificial Sequence
  source: /note="Description of Artificial Sequence: Synthetic oligonucleotide"
agcagcatcccaagacaccca

SEQ ID NO: 39517 - DNA, 21 bp, Artificial Sequence
  source: /note="Description of Artificial Sequence: Synthetic oligonucleotide"
agcagcatcccaagcaacgtc

SEQ ID NO: 39518 - DNA, 21 bp, Artificial Sequence
  source: /note="Description of Artificial Sequence: Synthetic oligonucleotide"
agcagcatccaaacagcacaa

SEQ ID NO: 39519 - DNA, 21 bp, Artificial Sequence
  source: /note="Description of Artificial Sequence: Synthetic oligonucleotide"
agcagcatcagaccaagccca

SEQ ID NO: 39520 - DNA, 21 bp, Artificial Sequence
  source: /note="Description of Artificial Sequence: Synthetic oligonucleotide"
agcagcatcagcggaagcagc

SEQ ID NO: 39521 - DNA, 21 bp, Artificial Sequence
  source: /note="Description of Artificial Sequence: Synthetic oligonucleotide"
agcagcatcagcccaaacgga

SEQ ID NO: 39522 - DNA, 21 bp, Artificial Sequence
  source: /note="Description of Artificial Sequence: Synthetic oligonucleotide"
agcagcaaagaaagcccactc

SEQ ID NO: 39523 - DNA, 21 bp, Artificial Sequence
  source: /note="Description of Artificial Sequence: Synthetic oligonucleotide"
agcagcaaaggataccacctc

SEQ ID NO: 39524 - DNA, 21 bp, Artificial Sequence
  source: /note="Description of Artificial Sequence: Synthetic oligonucleotide"
agcagcaaaggatacctcgtc

SEQ ID NO: 39525 - DNA, 21 bp, Artificial Sequence
  source: /note="Description of Artificial Sequence: Synthetic oligonucleotide"
agcagcaaactcgaaacagaa

SEQ ID NO: 39526 - DNA, 21 bp, Artificial Sequence
  source: /note="Description of Artificial Sequence: Synthetic oligonucleotide"
agcagcaaaatgacaggaagc

SEQ ID NO: 39527 - DNA, 21 bp, Artificial Sequence
  source: /note="Description of Artificial Sequence: Synthetic oligonucleotide"
agcagcaaacaagtcacaaac

SEQ ID NO: 39528 - DNA, 21 bp, Artificial Sequence
  source: /note="Description of Artificial Sequence: Synthetic oligonucleotide"
agcagcaaatacgcagaaaac

SEQ ID NO: 39529 - DNA, 21 bp, Artificial Sequence
  source: /note="Description of Artificial Sequence: Synthetic oligonucleotide"
agcagcctcgcaagcggagca

SEQ ID NO: 39530 - DNA, 21 bp, Artificial Sequence
  source: /note="Description of Artificial Sequence: Synthetic oligonucleotide"
agcagcctcgacagagaattc

SEQ ID NO: 39531 - DNA, 21 bp, Artificial Sequence
  source: /note="Description of Artificial Sequence: Synthetic oligonucleotide"
agcagcctcggagaaacactc

SEQ ID NO: 39532 - DNA, 21 bp, Artificial Sequence
  source: /note="Description of Artificial Sequence: Synthetic oligonucleotide"
agcagcctcatcgaactcctc

SEQ ID NO: 39533 - DNA, 21 bp, Artificial Sequence
  source: /note="Description of Artificial Sequence: Synthetic oligonucleotide"
agcagcctcaaaatcgaaaca

SEQ ID NO: 39534 - DNA, 21 bp, Artificial Sequence
  source: /note="Description of Artificial Sequence: Synthetic oligonucleotide"
agcagcctcaaactcaacgga

SEQ ID NO: 39535 - DNA, 21 bp, Artificial Sequence
  source: /note="Description of Artificial Sequence: Synthetic oligonucleotide"
agcagcctcaacacaggagca

SEQ ID NO: 39536 - DNA, 21 bp, Artificial Sequence
  source: /note="Description of Artificial Sequence: Synthetic oligonucleotide"
agcagcctcccagcaggaaga

SEQ ID NO: 39537 - DNA, 21 bp, Artificial Sequence
  source: /note="Description of Artificial Sequence: Synthetic oligonucleotide"
agcagcctcagaaacaacatc

SEQ ID NO: 39538 - DNA, 21 bp, Artificial Sequence
  source: /note="Description of Artificial Sequence: Synthetic oligonucleotide"
agcagcctcagaccagcaaca

SEQ ID NO: 39539 - DNA, 21 bp, Artificial Sequence
  source: /note="Description of Artificial Sequence: Synthetic oligonucleotide"
agcagcctcagcgacagagac

SEQ ID NO: 39540 - DNA, 21 bp, Artificial Sequence
  source: /note="Description of Artificial Sequence: Synthetic oligonucleotide"
agcagcctcagcagaacagga

SEQ ID NO: 39541 - DNA, 21 bp, Artificial Sequence
  source: /note="Description of Artificial Sequence: Synthetic oligonucleotide"
agcagcatggcaaaaaaagaa

SEQ ID NO: 39542 - DNA, 21 bp, Artificial Sequence
  source: /note="Description of Artificial Sequence: Synthetic oligonucleotide"
agcagcatggcactcggaaca

SEQ ID NO: 39543 - DNA, 21 bp, Artificial Sequence
  source: /note="Description of Artificial Sequence: Synthetic oligonucleotide"
agcagcatggtcgaccaagtc

SEQ ID NO: 39544 - DNA, 21 bp, Artificial Sequence
  source: /note="Description of Artificial Sequence: Synthetic oligonucleotide"
agcagcaacgcaatgctccca

SEQ ID NO: 39545 - DNA, 21 bp, Artificial Sequence
  source: /note="Description of Artificial Sequence: Synthetic oligonucleotide"
agcagcaacgaacacatgaga

SEQ ID NO: 39546 - DNA, 21 bp, Artificial Sequence
  source: /note="Description of Artificial Sequence: Synthetic oligonucleotide"
agcagcaacctcaaactcagc

SEQ ID NO: 39547 - DNA, 21 bp, Artificial Sequence
  source: /note="Description of Artificial Sequence: Synthetic oligonucleotide"
agcagcaacccaatgctcaga

SEQ ID NO: 39548 - DNA, 21 bp, Artificial Sequence
  source: /note="Description of Artificial Sequence: Synthetic oligonucleotide"
agcagcaacccacaaagagtc

SEQ ID NO: 39549 - DNA, 21 bp, Artificial Sequence
  source: /note="Description of Artificial Sequence: Synthetic oligonucleotide"
agcagcaacagagcaagcgtc

SEQ ID NO: 39550 - DNA, 21 bp, Artificial Sequence
  source: /note="Description of Artificial Sequence: Synthetic oligonucleotide"
agcagcaacagaggagaactc

SEQ ID NO: 39551 - DNA, 21 bp, Artificial Sequence
  source: /note="Description of Artificial Sequence: Synthetic oligonucleotide"
agcagcaacagcttcccaaga

SEQ ID NO: 39552 - DNA, 21 bp, Artificial Sequence
  source: /note="Description of Artificial Sequence: Synthetic oligonucleotide"
agcagcaacagcggagtccca

SEQ ID NO: 39553 - DNA, 21 bp, Artificial Sequence
  source: /note="Description of Artificial Sequence: Synthetic oligonucleotide"
agcagcaacagcagagcaatc

SEQ ID NO: 39554 - DNA, 21 bp, Artificial Sequence
  source: /note="Description of Artificial Sequence: Synthetic oligonucleotide"
agcagcaacagcagcttcgca

SEQ ID NO: 39555 - DNA, 21 bp, Artificial Sequence
  source: /note="Description of Artificial Sequence: Synthetic oligonucleotide"
agcagcaacagcgtcatcgca

SEQ ID NO: 39556 - DNA, 21 bp, Artificial Sequence
  source: /note="Description of Artificial Sequence: Synthetic oligonucleotide"
agcagcccagcactcaactac

SEQ ID NO: 39557 - DNA, 21 bp, Artificial Sequence
  source: /note="Description of Artificial Sequence: Synthetic oligonucleotide"
agcagcccagaaggactcgca

SEQ ID NO: 39558 - DNA, 21 bp, Artificial Sequence
  source: /note="Description of Artificial Sequence: Synthetic oligonucleotide"
agcagcccaatgagaagcgaa

SEQ ID NO: 39559 - DNA, 21 bp, Artificial Sequence
  source: /note="Description of Artificial Sequence: Synthetic oligonucleotide"
agcagcccaccaggaaacgga

SEQ ID NO: 39560 - DNA, 21 bp, Artificial Sequence
  source: /note="Description of Artificial Sequence: Synthetic oligonucleotide"
agcagcccaagaggattcgga

SEQ ID NO: 39561 - DNA, 21 bp, Artificial Sequence
  source: /note="Description of Artificial Sequence: Synthetic oligonucleotide"
agcagcccaagacacagcgaa

SEQ ID NO: 39562 - DNA, 21 bp, Artificial Sequence
  source: /note="Description of Artificial Sequence: Synthetic oligonucleotide"
agcagcccaagcctcacactc

SEQ ID NO: 39563 - DNA, 21 bp, Artificial Sequence
  source: /note="Description of Artificial Sequence: Synthetic oligonucleotide"
agcagcccaagcagcaacgga

SEQ ID NO: 39564 - DNA, 21 bp, Artificial Sequence
  source: /note="Description of Artificial Sequence: Synthetic oligonucleotide"
agcagcccaacatgctgccca

SEQ ID NO: 39565 - DNA, 21 bp, Artificial Sequence
  source: /note="Description of Artificial Sequence: Synthetic oligonucleotide"
agcagcccaacaatgttcgtc

SEQ ID NO: 39566 - DNA, 21 bp, Artificial Sequence
  source: /note="Description of Artificial Sequence: Synthetic oligonucleotide"
agcagcccaacaccactcaaa

SEQ ID NO: 39567 - DNA, 21 bp, Artificial Sequence
  source: /note="Description of Artificial Sequence: Synthetic oligonucleotide"
agcagcccagtcgcaagcagc

SEQ ID NO: 39568 - DNA, 21 bp, Artificial Sequence
  source: /note="Description of Artificial Sequence: Synthetic oligonucleotide"
agcagcccagtcaaaacactc

SEQ ID NO: 39569 - DNA, 21 bp, Artificial Sequence
  source: /note="Description of Artificial Sequence: Synthetic oligonucleotide"
agcagcccatacccaatgatg

SEQ ID NO: 39570 - DNA, 21 bp, Artificial Sequence
  source: /note="Description of Artificial Sequence: Synthetic oligonucleotide"
agcagccaagaaagaaacgtc

SEQ ID NO: 39571 - DNA, 21 bp, Artificial Sequence
  source: /note="Description of Artificial Sequence: Synthetic oligonucleotide"
agcagccaaggaccaatcaga

SEQ ID NO: 39572 - DNA, 21 bp, Artificial Sequence
  source: /note="Description of Artificial Sequence: Synthetic oligonucleotide"
agcagccaaaaaccagtcctc

SEQ ID NO: 39573 - DNA, 21 bp, Artificial Sequence
  source: /note="Description of Artificial Sequence: Synthetic oligonucleotide"
agcagccaactcctcctcgac

SEQ ID NO: 39574 - DNA, 21 bp, Artificial Sequence
  source: /note="Description of Artificial Sequence: Synthetic oligonucleotide"
agcagccaaatgctctaccca

SEQ ID NO: 39575 - DNA, 21 bp, Artificial Sequence
  source: /note="Description of Artificial Sequence: Synthetic oligonucleotide"
agcagccaaccactcgaactc

SEQ ID NO: 39576 - DNA, 21 bp, Artificial Sequence
  source: /note="Description of Artificial Sequence: Synthetic oligonucleotide"
agcagccaaccaatgagctac

SEQ ID NO: 39577 - DNA, 21 bp, Artificial Sequence
  source: /note="Description of Artificial Sequence: Synthetic oligonucleotide"
agcagccaaagagtcccaagc

SEQ ID NO: 39578 - DNA, 21 bp, Artificial Sequence
  source: /note="Description of Artificial Sequence: Synthetic oligonucleotide"
agcagccaaagcatgacactc

SEQ ID NO: 39579 - DNA, 21 bp, Artificial Sequence
  source: /note="Description of Artificial Sequence: Synthetic oligonucleotide"
agcagccaagtcaaaacactc

SEQ ID NO: 39580 - DNA, 21 bp, Artificial Sequence
  source: /note="Description of Artificial Sequence: Synthetic oligonucleotide"
agcagccaatggcacgcagga

SEQ ID NO: 39581 - DNA, 21 bp, Artificial Sequence
  source: /note="Description of Artificial Sequence: Synthetic oligonucleotide"
agcagcagagcaggaacagaa

SEQ ID NO: 39582 - DNA, 21 bp, Artificial Sequence
  source: /note="Description of Artificial Sequence: Synthetic oligonucleotide"
agcagcagagacatgacaagc

SEQ ID NO: 39583 - DNA, 21 bp, Artificial Sequence
  source: /note="Description of Artificial Sequence: Synthetic oligonucleotide"
agcagcagagacgtcggaaga

SEQ ID NO: 39584 - DNA, 21 bp, Artificial Sequence
  source: /note="Description of Artificial Sequence: Synthetic oligonucleotide"
agcagcagaggaccaatcgca

SEQ ID NO: 39585 - DNA, 21 bp, Artificial Sequence
  source: /note="Description of Artificial Sequence: Synthetic oligonucleotide"
agcagcagaggaagcccaagc

SEQ ID NO: 39586 - DNA, 21 bp, Artificial Sequence
  source: /note="Description of Artificial Sequence: Synthetic oligonucleotide"
agcagcagaggagtcccagga

SEQ ID NO: 39587 - DNA, 21 bp, Artificial Sequence
  source: /note="Description of Artificial Sequence: Synthetic oligonucleotide"
agcagcagaatcaacccaatg

SEQ ID NO: 39588 - DNA, 21 bp, Artificial Sequence
  source: /note="Description of Artificial Sequence: Synthetic oligonucleotide"
agcagcagaatcccagacaca

SEQ ID NO: 39589 - DNA, 21 bp, Artificial Sequence
  source: /note="Description of Artificial Sequence: Synthetic oligonucleotide"
agcagcagactcaacgaacaa

SEQ ID NO: 39590 - DNA, 21 bp, Artificial Sequence
  source: /note="Description of Artificial Sequence: Synthetic oligonucleotide"
agcagcagactcagcgcagac

SEQ ID NO: 39591 - DNA, 21 bp, Artificial Sequence
  source: /note="Description of Artificial Sequence: Synthetic oligonucleotide"
agcagcagactcagcgaaagc

SEQ ID NO: 39592 - DNA, 21 bp, Artificial Sequence
  source: /note="Description of Artificial Sequence: Synthetic oligonucleotide"
agcagcagaccaggaatgagc

SEQ ID NO: 39593 - DNA, 21 bp, Artificial Sequence
  source: /note="Description of Artificial Sequence: Synthetic oligonucleotide"
agcagcagaccaggacaacac

SEQ ID NO: 39594 - DNA, 21 bp, Artificial Sequence
  source: /note="Description of Artificial Sequence: Synthetic oligonucleotide"
agcagcagaccaaacgacgac

SEQ ID NO: 39595 - DNA, 21 bp, Artificial Sequence
  source: /note="Description of Artificial Sequence: Synthetic oligonucleotide"
agcagcagaccaagcggaagc

SEQ ID NO: 39596 - DNA, 21 bp, Artificial Sequence
  source: /note="Description of Artificial Sequence: Synthetic oligonucleotide"
agcagcagaagcgcacaaagc

SEQ ID NO: 39597 - DNA, 21 bp, Artificial Sequence
  source: /note="Description of Artificial Sequence: Synthetic oligonucleotide"
agcagcagaagcccagacctc

SEQ ID NO: 39598 - DNA, 21 bp, Artificial Sequence
  source: /note="Description of Artificial Sequence: Synthetic oligonucleotide"
agcagcagaacaaacagctac

SEQ ID NO: 39599 - DNA, 21 bp, Artificial Sequence
  source: /note="Description of Artificial Sequence: Synthetic oligonucleotide"
agcagcagaacagtcgaagca

SEQ ID NO: 39600 - DNA, 21 bp, Artificial Sequence
  source: /note="Description of Artificial Sequence: Synthetic oligonucleotide"
agcagcagcgcactcgtcctc

SEQ ID NO: 39601 - DNA, 21 bp, Artificial Sequence
  source: /note="Description of Artificial Sequence: Synthetic oligonucleotide"
agcagcagcgcagtcgcaagc

SEQ ID NO: 39602 - DNA, 21 bp, Artificial Sequence
  source: /note="Description of Artificial Sequence: Synthetic oligonucleotide"
agcagcagcgaaagcgcatgg

SEQ ID NO: 39603 - DNA, 21 bp, Artificial Sequence
  source: /note="Description of Artificial Sequence: Synthetic oligonucleotide"
agcagcagcggaacacaccca

SEQ ID NO: 39604 - DNA, 21 bp, Artificial Sequence
  source: /note="Description of Artificial Sequence: Synthetic oligonucleotide"
agcagcagcatcatcagaaca

SEQ ID NO: 39605 - DNA, 21 bp, Artificial Sequence
  source: /note="Description of Artificial Sequence: Synthetic oligonucleotide"
agcagcagcatcagagcaaac

SEQ ID NO: 39606 - DNA, 21 bp, Artificial Sequence
  source: /note="Description of Artificial Sequence: Synthetic oligonucleotide"
agcagcagcaaaccacacctc

SEQ ID NO: 39607 - DNA, 21 bp, Artificial Sequence
  source: /note="Description of Artificial Sequence: Synthetic oligonucleotide"
agcagcagcctcgacagcaga

SEQ ID NO: 39608 - DNA, 21 bp, Artificial Sequence
  source: /note="Description of Artificial Sequence: Synthetic oligonucleotide"
agcagcagcctccaactcgga

SEQ ID NO: 39609 - DNA, 21 bp, Artificial Sequence
  source: /note="Description of Artificial Sequence: Synthetic oligonucleotide"
agcagcagcctcagccacagc

SEQ ID NO: 39610 - DNA, 21 bp, Artificial Sequence
  source: /note="Description of Artificial Sequence: Synthetic oligonucleotide"
agcagcagcatgagagaaaga

SEQ ID NO: 39611 - DNA, 21 bp, Artificial Sequence
  source: /note="Description of Artificial Sequence: Synthetic oligonucleotide"
agcagcagcaacacactcaca

SEQ ID NO: 39612 - DNA, 21 bp, Artificial Sequence
  source: /note="Description of Artificial Sequence: Synthetic oligonucleotide"
agcagcagcagagcagtcgaa

SEQ ID NO: 39613 - DNA, 21 bp, Artificial Sequence
  source: /note="Description of Artificial Sequence: Synthetic oligonucleotide"
agcagcagcagaccaacacaa

SEQ ID NO: 39614 - DNA, 21 bp, Artificial Sequence
  source: /note="Description of Artificial Sequence: Synthetic oligonucleotide"
agcagcagcagcaaaacacca

SEQ ID NO: 39615 - DNA, 21 bp, Artificial Sequence
  source: /note="Description of Artificial Sequence: Synthetic oligonucleotide"
agcagcagcagcctctacaca

SEQ ID NO: 39616 - DNA, 21 bp, Artificial Sequence
  source: /note="Description of Artificial Sequence: Synthetic oligonucleotide"
agcagcagcagcccaagagca

SEQ ID NO: 39617 - DNA, 21 bp, Artificial Sequence
  source: /note="Description of Artificial Sequence: Synthetic oligonucleotide"
agcagcagcagcagcagacca

SEQ ID NO: 39618 - DNA, 21 bp, Artificial Sequence
  source: /note="Description of Artificial Sequence: Synthetic oligonucleotide"
agcagcagcagcgtcagagca

SEQ ID NO: 39619 - DNA, 21 bp, Artificial Sequence
  source: /note="Description of Artificial Sequence: Synthetic oligonucleotide"
agcagcagcacaccaccactc

SEQ ID NO: 39620 - DNA, 21 bp, Artificial Sequence
  source: /note="Description of Artificial Sequence: Synthetic oligonucleotide"
agcagcagcacaccaccaagc

SEQ ID NO: 39621 - DNA, 21 bp, Artificial Sequence
  source: /note="Description of Artificial Sequence: Synthetic oligonucleotide"
agcagcagcacaccaccaaca

SEQ ID NO: 39622 - DNA, 21 bp, Artificial Sequence
  source: /note="Description of Artificial Sequence: Synthetic oligonucleotide"
agcagcagcacaagcacagga

SEQ ID NO: 39623 - DNA, 21 bp, Artificial Sequence
  source: /note="Description of Artificial Sequence: Synthetic oligonucleotide"
agcagcagcacagtccaattc

SEQ ID NO: 39624 - DNA, 21 bp, Artificial Sequence
  source: /note="Description of Artificial Sequence: Synthetic oligonucleotide"
agcagcagcgtcagcaacaac

SEQ ID NO: 39625 - DNA, 21 bp, Artificial Sequence
  source: /note="Description of Artificial Sequence: Synthetic oligonucleotide"
agcagcagctacaacggaaaa

SEQ ID NO: 39626 - DNA, 21 bp, Artificial Sequence
  source: /note="Description of Artificial Sequence: Synthetic oligonucleotide"
agcagcacagaaagcatcaga

SEQ ID NO: 39627 - DNA, 21 bp, Artificial Sequence
  source: /note="Description of Artificial Sequence: Synthetic oligonucleotide"
agcagcacacacgaaaaacca

SEQ ID NO: 39628 - DNA, 21 bp, Artificial Sequence
  source: /note="Description of Artificial Sequence: Synthetic oligonucleotide"
agcagcacaaaaagcctcgca

SEQ ID NO: 39629 - DNA, 21 bp, Artificial Sequence
  source: /note="Description of Artificial Sequence: Synthetic oligonucleotide"
agcagcacaccaccaaaatac

SEQ ID NO: 39630 - DNA, 21 bp, Artificial Sequence
  source: /note="Description of Artificial Sequence: Synthetic oligonucleotide"
agcagcacaccaacaagccac

SEQ ID NO: 39631 - DNA, 21 bp, Artificial Sequence
  source: /note="Description of Artificial Sequence: Synthetic oligonucleotide"
agcagcacaccaacaacagca

SEQ ID NO: 39632 - DNA, 21 bp, Artificial Sequence
  source: /note="Description of Artificial Sequence: Synthetic oligonucleotide"
agcagcacaagagacgcacac

SEQ ID NO: 39633 - DNA, 21 bp, Artificial Sequence
  source: /note="Description of Artificial Sequence: Synthetic oligonucleotide"
agcagcacaagaacaccacca

SEQ ID NO: 39634 - DNA, 21 bp, Artificial Sequence
  source: /note="Description of Artificial Sequence: Synthetic oligonucleotide"
agcagcacaagcagcagattc

SEQ ID NO: 39635 - DNA, 21 bp, Artificial Sequence
  source: /note="Description of Artificial Sequence: Synthetic oligonucleotide"
agcagcacaagcacactcctc

SEQ ID NO: 39636 - DNA, 21 bp, Artificial Sequence
  source: /note="Description of Artificial Sequence: Synthetic oligonucleotide"
agcagcacaacaatgatcgaa

SEQ ID NO: 39637 - DNA, 21 bp, Artificial Sequence
  source: /note="Description of Artificial Sequence: Synthetic oligonucleotide"
agcagcgtcgcaagcacagtc

SEQ ID NO: 39638 - DNA, 21 bp, Artificial Sequence
  source: /note="Description of Artificial Sequence: Synthetic oligonucleotide"
agcagcgtcggaagcgcagga

SEQ ID NO: 39639 - DNA, 21 bp, Artificial Sequence
  source: /note="Description of Artificial Sequence: Synthetic oligonucleotide"
agcagcgtccacctctaccca

SEQ ID NO: 39640 - DNA, 21 bp, Artificial Sequence
  source: /note="Description of Artificial Sequence: Synthetic oligonucleotide"
agcagcgtccacagcagaatg

SEQ ID NO: 39641 - DNA, 21 bp, Artificial Sequence
  source: /note="Description of Artificial Sequence: Synthetic oligonucleotide"
agcagcgtcaacacaagcgga

SEQ ID NO: 39642 - DNA, 21 bp, Artificial Sequence
  source: /note="Description of Artificial Sequence: Synthetic oligonucleotide"
agcagcgtcccaagaccaagc

SEQ ID NO: 39643 - DNA, 21 bp, Artificial Sequence
  source: /note="Description of Artificial Sequence: Synthetic oligonucleotide"
agcagcgtcagactcctcagc

SEQ ID NO: 39644 - DNA, 21 bp, Artificial Sequence
  source: /note="Description of Artificial Sequence: Synthetic oligonucleotide"
agcagcgtcagcggactcagc

SEQ ID NO: 39645 - DNA, 21 bp, Artificial Sequence
  source: /note="Description of Artificial Sequence: Synthetic oligonucleotide"
agcagcgtcacaagaacagga

SEQ ID NO: 39646 - DNA, 21 bp, Artificial Sequence
  source: /note="Description of Artificial Sequence: Synthetic oligonucleotide"
agcagcgtcacagtcagcagc

SEQ ID NO: 39647 - DNA, 21 bp, Artificial Sequence
  source: /note="Description of Artificial Sequence: Synthetic oligonucleotide"
agcagcgtcgtccacggagtc

SEQ ID NO: 39648 - DNA, 21 bp, Artificial Sequence
  source: /note="Description of Artificial Sequence: Synthetic oligonucleotide"
agcagcgtcgtcccaagcatg

SEQ ID NO: 39649 - DNA, 21 bp, Artificial Sequence
  source: /note="Description of Artificial Sequence: Synthetic oligonucleotide"
agcagctggcaaccattcgaa

SEQ ID NO: 39650 - DNA, 21 bp, Artificial Sequence
  source: /note="Description of Artificial Sequence: Synthetic oligonucleotide"
agcagctacgcaccactccac

SEQ ID NO: 39651 - DNA, 21 bp, Artificial Sequence
  source: /note="Description of Artificial Sequence: Synthetic oligonucleotide"
agcagctacgcaagcggaagc

SEQ ID NO: 39652 - DNA, 21 bp, Artificial Sequence
  source: /note="Description of Artificial Sequence: Synthetic oligonucleotide"
agcagctacgacagcagcaaa

SEQ ID NO: 39653 - DNA, 21 bp, Artificial Sequence
  source: /note="Description of Artificial Sequence: Synthetic oligonucleotide"
agcagctacgaaaaaggaaca

SEQ ID NO: 39654 - DNA, 21 bp, Artificial Sequence
  source: /note="Description of Artificial Sequence: Synthetic oligonucleotide"
agcagctaccacggactcaca

SEQ ID NO: 39655 - DNA, 21 bp, Artificial Sequence
  source: /note="Description of Artificial Sequence: Synthetic oligonucleotide"
agcagctaccacccagcagaa

SEQ ID NO: 39656 - DNA, 21 bp, Artificial Sequence
  source: /note="Description of Artificial Sequence: Synthetic oligonucleotide"
agcagctacccaggacacagc

SEQ ID NO: 39657 - DNA, 21 bp, Artificial Sequence
  source: /note="Description of Artificial Sequence: Synthetic oligonucleotide"
agcagctacagcgtcccagaa

SEQ ID NO: 39658 - DNA, 21 bp, Artificial Sequence
  source: /note="Description of Artificial Sequence: Synthetic oligonucleotide"
agcacagcaatcacaatccac

SEQ ID NO: 39659 - DNA, 21 bp, Artificial Sequence
  source: /note="Description of Artificial Sequence: Synthetic oligonucleotide"
agcacagcactcggaatcgtc

SEQ ID NO: 39660 - DNA, 21 bp, Artificial Sequence
  source: /note="Description of Artificial Sequence: Synthetic oligonucleotide"
agcacagcaaacgcacaaaca

SEQ ID NO: 39661 - DNA, 21 bp, Artificial Sequence
  source: /note="Description of Artificial Sequence: Synthetic oligonucleotide"
agcacagcaccaggagcagca

SEQ ID NO: 39662 - DNA, 21 bp, Artificial Sequence
  source: /note="Description of Artificial Sequence: Synthetic oligonucleotide"
agcacagcaagagcaagcaca

SEQ ID NO: 39663 - DNA, 21 bp, Artificial Sequence
  source: /note="Description of Artificial Sequence: Synthetic oligonucleotide"
agcacagcaagactcagagac

SEQ ID NO: 39664 - DNA, 21 bp, Artificial Sequence
  source: /note="Description of Artificial Sequence: Synthetic oligonucleotide"
agcacagcaacacaactcatg

SEQ ID NO: 39665 - DNA, 21 bp, Artificial Sequence
  source: /note="Description of Artificial Sequence: Synthetic oligonucleotide"
agcacatgccacccaagcgga

SEQ ID NO: 39666 - DNA, 21 bp, Artificial Sequence
  source: /note="Description of Artificial Sequence: Synthetic oligonucleotide"
agcacagacgaacacgtcatg

SEQ ID NO: 39667 - DNA, 21 bp, Artificial Sequence
  source: /note="Description of Artificial Sequence: Synthetic oligonucleotide"
agcacagaccacacagcatac

SEQ ID NO: 39668 - DNA, 21 bp, Artificial Sequence
  source: /note="Description of Artificial Sequence: Synthetic oligonucleotide"
agcacagacctcagacaagca

SEQ ID NO: 39669 - DNA, 21 bp, Artificial Sequence
  source: /note="Description of Artificial Sequence: Synthetic oligonucleotide"
agcacagacatgagacacatc

SEQ ID NO: 39670 - DNA, 21 bp, Artificial Sequence
  source: /note="Description of Artificial Sequence: Synthetic oligonucleotide"
agcacagacaacgacctcaga

SEQ ID NO: 39671 - DNA, 21 bp, Artificial Sequence
  source: /note="Description of Artificial Sequence: Synthetic oligonucleotide"
agcacagacacaaaccaccaa

SEQ ID NO: 39672 - DNA, 21 bp, Artificial Sequence
  source: /note="Description of Artificial Sequence: Synthetic oligonucleotide"
agcacagacgtcaaaacacaa

SEQ ID NO: 39673 - DNA, 21 bp, Artificial Sequence
  source: /note="Description of Artificial Sequence: Synthetic oligonucleotide"
agcacagaattcaaaagcgca

SEQ ID NO: 39674 - DNA, 21 bp, Artificial Sequence
  source: /note="Description of Artificial Sequence: Synthetic oligonucleotide"
agcacagaaagaccaatgcca

SEQ ID NO: 39675 - DNA, 21 bp, Artificial Sequence
  source: /note="Description of Artificial Sequence: Synthetic oligonucleotide"
agcacagaaacagcacaaagc

SEQ ID NO: 39676 - DNA, 21 bp, Artificial Sequence
  source: /note="Description of Artificial Sequence: Synthetic oligonucleotide"
agcacattcaaaaacgtcgtc

SEQ ID NO: 39677 - DNA, 21 bp, Artificial Sequence
  source: /note="Description of Artificial Sequence: Synthetic oligonucleotide"
agcacattcaacagcgcagga

SEQ ID NO: 39678 - DNA, 21 bp, Artificial Sequence
  source: /note="Description of Artificial Sequence: Synthetic oligonucleotide"
agcacattcagcagcagcatg

SEQ ID NO: 39679 - DNA, 21 bp, Artificial Sequence
  source: /note="Description of Artificial Sequence: Synthetic oligonucleotide"
agcacattcgtcacagcagga

SEQ ID NO: 39680 - DNA, 21 bp, Artificial Sequence
  source: /note="Description of Artificial Sequence: Synthetic oligonucleotide"
agcacattcgtcacaagaagc

SEQ ID NO: 39681 - DNA, 21 bp, Artificial Sequence
  source: /note="Description of Artificial Sequence: Synthetic oligonucleotide"
agcacaggagcactcccaagc

SEQ ID NO: 39682 - DNA, 21 bp, Artificial Sequence
  source: /note="Description of Artificial Sequence: Synthetic oligonucleotide"
agcacaggagcaatgctccac

SEQ ID NO: 39683 - DNA, 21 bp, Artificial Sequence
  source: /note="Description of Artificial Sequence: Synthetic oligonucleotide"
agcacaggagcaccaccagac

SEQ ID NO: 39684 - DNA, 21 bp, Artificial Sequence
  source: /note="Description of Artificial Sequence: Synthetic oligonucleotide"
agcacaggaatgggagcattc

SEQ ID NO: 39685 - DNA, 21 bp, Artificial Sequence
  source: /note="Description of Artificial Sequence: Synthetic oligonucleotide"
agcacaggaccattcctccca

SEQ ID NO: 39686 - DNA, 21 bp, Artificial Sequence
  source: /note="Description of Artificial Sequence: Synthetic oligonucleotide"
agcacaggaagcgcacaaaca

SEQ ID NO: 39687 - DNA, 21 bp, Artificial Sequence
  source: /note="Description of Artificial Sequence: Synthetic oligonucleotide"
agcacaggaagcacactccaa

SEQ ID NO: 39688 - DNA, 21 bp, Artificial Sequence
  source: /note="Description of Artificial Sequence: Synthetic oligonucleotide"
agcacaggatacggaggactc

SEQ ID NO: 39689 - DNA, 21 bp, Artificial Sequence
  source: /note="Description of Artificial Sequence: Synthetic oligonucleotide"
agcacacacatcagcccacca

SEQ ID NO: 39690 - DNA, 21 bp, Artificial Sequence
  source: /note="Description of Artificial Sequence: Synthetic oligonucleotide"
agcacacacatgagactcgca

SEQ ID NO: 39691 - DNA, 21 bp, Artificial Sequence
  source: /note="Description of Artificial Sequence: Synthetic oligonucleotide"
agcacacacaacctcacaagc

SEQ ID NO: 39692 - DNA, 21 bp, Artificial Sequence
  source: /note="Description of Artificial Sequence: Synthetic oligonucleotide"
agcacacacagagacagcagc

SEQ ID NO: 39693 - DNA, 21 bp, Artificial Sequence
  source: /note="Description of Artificial Sequence: Synthetic oligonucleotide"
agcacacacagaagcctcgca

SEQ ID NO: 39694 - DNA, 21 bp, Artificial Sequence
  source: /note="Description of Artificial Sequence: Synthetic oligonucleotide"
agcacacacagctacccagtc

SEQ ID NO: 39695 - DNA, 21 bp, Artificial Sequence
  source: /note="Description of Artificial Sequence: Synthetic oligonucleotide"
agcacacacgtcagcagcaca

SEQ ID NO: 39696 - DNA, 21 bp, Artificial Sequence
  source: /note="Description of Artificial Sequence: Synthetic oligonucleotide"
agcacaatcgcaggaacacca

SEQ ID NO: 39697 - DNA, 21 bp, Artificial Sequence
  source: /note="Description of Artificial Sequence: Synthetic oligonucleotide"
agcacaatcagcgcactcgca

SEQ ID NO: 39698 - DNA, 21 bp, Artificial Sequence
  source: /note="Description of Artificial Sequence: Synthetic oligonucleotide"
agcacaaaagaaagccaactc

SEQ ID NO: 39699 - DNA, 21 bp, Artificial Sequence
  source: /note="Description of Artificial Sequence: Synthetic oligonucleotide"
agcacaaaaagcggaacacca

SEQ ID NO: 39700 - DNA, 21 bp, Artificial Sequence
  source: /note="Description of Artificial Sequence: Synthetic oligonucleotide"
agcacaaaaacaccaccagca

SEQ ID NO: 39701 - DNA, 21 bp, Artificial Sequence
  source: /note="Description of Artificial Sequence: Synthetic oligonucleotide"
agcacaaaatacagcagcgtc

SEQ ID NO: 39702 - DNA, 21 bp, Artificial Sequence
  source: /note="Description of Artificial Sequence: Synthetic oligonucleotide"
agcacactcgcaagagacaac

SEQ ID NO: 39703 - DNA, 21 bp, Artificial Sequence
  source: /note="Description of Artificial Sequence: Synthetic oligonucleotide"
agcacactcgcaagagtccca

SEQ ID NO: 39704 - DNA, 21 bp, Artificial Sequence
  source: /note="Description of Artificial Sequence: Synthetic oligonucleotide"
agcacactctgcccagtcctc

SEQ ID NO: 39705 - DNA, 21 bp, Artificial Sequence
  source: /note="Description of Artificial Sequence: Synthetic oligonucleotide"
agcacactcggaggaggatac

SEQ ID NO: 39706 - DNA, 21 bp, Artificial Sequence
  source: /note="Description of Artificial Sequence: Synthetic oligonucleotide"
agcacactcaacaacgtccca

SEQ ID NO: 39707 - DNA, 21 bp, Artificial Sequence
  source: /note="Description of Artificial Sequence: Synthetic oligonucleotide"
agcacactcccaagcccagaa

SEQ ID NO: 39708 - DNA, 21 bp, Artificial Sequence
  source: /note="Description of Artificial Sequence: Synthetic oligonucleotide"
agcacactcccaagcagacca

SEQ ID NO: 39709 - DNA, 21 bp, Artificial Sequence
  source: /note="Description of Artificial Sequence: Synthetic oligonucleotide"
agcacactcagatgcggagaa

SEQ ID NO: 39710 - DNA, 21 bp, Artificial Sequence
  source: /note="Description of Artificial Sequence: Synthetic oligonucleotide"
agcacactcgtcaaaaacgca

SEQ ID NO: 39711 - DNA, 21 bp, Artificial Sequence
  source: /note="Description of Artificial Sequence: Synthetic oligonucleotide"
agcacactcgtcagagcagaa

SEQ ID NO: 39712 - DNA, 21 bp, Artificial Sequence
  source: /note="Description of Artificial Sequence: Synthetic oligonucleotide"
agcacaatggcaggaagacac

SEQ ID NO: 39713 - DNA, 21 bp, Artificial Sequence
  source: /note="Description of Artificial Sequence: Synthetic oligonucleotide"
agcacaatgatcgcacacagc

SEQ ID NO: 39714 - DNA, 21 bp, Artificial Sequence
  source: /note="Description of Artificial Sequence: Synthetic oligonucleotide"
agcacaatgctcctcccaagc

SEQ ID NO: 39715 - DNA, 21 bp, Artificial Sequence
  source: /note="Description of Artificial Sequence: Synthetic oligonucleotide"
agcacaatgaacagaggactc

SEQ ID NO: 39716 - DNA, 21 bp, Artificial Sequence
  source: /note="Description of Artificial Sequence: Synthetic oligonucleotide"
agcacaatgagaccacaactc

SEQ ID NO: 39717 - DNA, 21 bp, Artificial Sequence
  source: /note="Description of Artificial Sequence: Synthetic oligonucleotide"
agcacaatgagcgtcaaagaa

SEQ ID NO: 39718 - DNA, 21 bp, Artificial Sequence
  source: /note="Description of Artificial Sequence: Synthetic oligonucleotide"
agcacaaacgcaacaagcaac

SEQ ID NO: 39719 - DNA, 21 bp, Artificial Sequence
  source: /note="Description of Artificial Sequence: Synthetic oligonucleotide"
agcacaaacatcgtcgaatac

SEQ ID NO: 39720 - DNA, 21 bp, Artificial Sequence
  source: /note="Description of Artificial Sequence: Synthetic oligonucleotide"
agcacaaacagaagcacagtc

SEQ ID NO: 39721 - DNA, 21 bp, Artificial Sequence
  source: /note="Description of Artificial Sequence: Synthetic oligonucleotide"
agcacaaacacagcactctgg

SEQ ID NO: 39722 - DNA, 21 bp, Artificial Sequence
  source: /note="Description of Artificial Sequence: Synthetic oligonucleotide"
agcacaaacacaccaagagga

SEQ ID NO: 39723 - DNA, 21 bp, Artificial Sequence
  source: /note="Description of Artificial Sequence: Synthetic oligonucleotide"
agcacaaacacacaagcatac

SEQ ID NO: 39724 - DNA, 21 bp, Artificial Sequence
  source: /note="Description of Artificial Sequence: Synthetic oligonucleotide"
agcacaaacacaagagaagaa

SEQ ID NO: 39725 - DNA, 21 bp, Artificial Sequence
  source: /note="Description of Artificial Sequence: Synthetic oligonucleotide"
agcacaaacgtcggactcgca

SEQ ID NO: 39726 - DNA, 21 bp, Artificial Sequence
  source: /note="Description of Artificial Sequence: Synthetic oligonucleotide"
agcacaccagcaaaatacgga

SEQ ID NO: 39727 - DNA, 21 bp, Artificial Sequence
  source: /note="Description of Artificial Sequence: Synthetic oligonucleotide"
agcacaccagcaagcagagca

SEQ ID NO: 39728 - DNA, 21 bp, Artificial Sequence
  source: /note="Description of Artificial Sequence: Synthetic oligonucleotide"
agcacaccagacaaccacaca

SEQ ID NO: 39729 - DNA, 21 bp, Artificial Sequence
  source: /note="Description of Artificial Sequence: Synthetic oligonucleotide"
agcacaccagacagacaaaca

SEQ ID NO: 39730 - DNA, 21 bp, Artificial Sequence
  source: /note="Description of Artificial Sequence: Synthetic oligonucleotide"
agcacaccacacacaaacgca

SEQ ID NO: 39731 - DNA, 21 bp, Artificial Sequence
  source: /note="Description of Artificial Sequence: Synthetic oligonucleotide"
agcacaccaaaaccaagccca

SEQ ID NO: 39732 - DNA, 21 bp, Artificial Sequence
  source: /note="Description of Artificial Sequence: Synthetic oligonucleotide"
agcacaccactcatcgcaaaa

SEQ ID NO: 39733 - DNA, 21 bp, Artificial Sequence
  source: /note="Description of Artificial Sequence: Synthetic oligonucleotide"
agcacaccactcccaagaaca

SEQ ID NO: 39734 - DNA, 21 bp, Artificial Sequence
  source: /note="Description of Artificial Sequence: Synthetic oligonucleotide"
agcacaccactccaaacacca

SEQ ID NO: 39735 - DNA, 21 bp, Artificial Sequence
  source: /note="Description of Artificial Sequence: Synthetic oligonucleotide"
agcacaccactcagaacaagc

SEQ ID NO: 39736 - DNA, 21 bp, Artificial Sequence
  source: /note="Description of Artificial Sequence: Synthetic oligonucleotide"
agcacaccaaacgcaagaatc

SEQ ID NO: 39737 - DNA, 21 bp, Artificial Sequence
  source: /note="Description of Artificial Sequence: Synthetic oligonucleotide"
agcacaccaaacatgaacaga

SEQ ID NO: 39738 - DNA, 21 bp, Artificial Sequence
  source: /note="Description of Artificial Sequence: Synthetic oligonucleotide"
agcacaccaccagcaagaagc

SEQ ID NO: 39739 - DNA, 21 bp, Artificial Sequence
  source: /note="Description of Artificial Sequence: Synthetic oligonucleotide"
agcacaccaccactctacgaa

SEQ ID NO: 39740 - DNA, 21 bp, Artificial Sequence
  source: /note="Description of Artificial Sequence: Synthetic oligonucleotide"
agcacaccaccaacaacactc

SEQ ID NO: 39741 - DNA, 21 bp, Artificial Sequence
  source: /note="Description of Artificial Sequence: Synthetic oligonucleotide"
agcacaccaagaccacacgac

SEQ ID NO: 39742 - DNA, 21 bp, Artificial Sequence
  source: /note="Description of Artificial Sequence: Synthetic oligonucleotide"
agcacaccaacaggagcactc

SEQ ID NO: 39743 - DNA, 21 bp, Artificial Sequence
  source: /note="Description of Artificial Sequence: Synthetic oligonucleotide"
agcacacaacaaagaagcgga

SEQ ID NO: 39744 - DNA, 21 bp, Artificial Sequence
  source: /note="Description of Artificial Sequence: Synthetic oligonucleotide"
agcacacaaagagcagcagca

SEQ ID NO: 39745 - DNA, 21 bp, Artificial Sequence
  source: /note="Description of Artificial Sequence: Synthetic oligonucleotide"
agcacacaagtccacctcctc

SEQ ID NO: 39746 - DNA, 21 bp, Artificial Sequence
  source: /note="Description of Artificial Sequence: Synthetic oligonucleotide"
agcacacaagtccacatgatg

SEQ ID NO: 39747 - DNA, 21 bp, Artificial Sequence
  source: /note="Description of Artificial Sequence: Synthetic oligonucleotide"
agcacacaagtcccaaacaaa

SEQ ID NO: 39748 - DNA, 21 bp, Artificial Sequence
  source: /note="Description of Artificial Sequence: Synthetic oligonucleotide"
agcacacaatggagaacagaa

SEQ ID NO: 39749 - DNA, 21 bp, Artificial Sequence
  source: /note="Description of Artificial Sequence: Synthetic oligonucleotide"
agcacacaatacagcccagtc

SEQ ID NO: 39750 - DNA, 21 bp, Artificial Sequence
  source: /note="Description of Artificial Sequence: Synthetic oligonucleotide"
agcacaagagcaccaacagca

SEQ ID NO: 39751 - DNA, 21 bp, Artificial Sequence
  source: /note="Description of Artificial Sequence: Synthetic oligonucleotide"
agcacaagagacacaagcaac

SEQ ID NO: 39752 - DNA, 21 bp, Artificial Sequence
  source: /note="Description of Artificial Sequence: Synthetic oligonucleotide"
agcacaagagaagcaaaacca

SEQ ID NO: 39753 - DNA, 21 bp, Artificial Sequence
  source: /note="Description of Artificial Sequence: Synthetic oligonucleotide"
agcacaagagaagacgtcctc

SEQ ID NO: 39754 - DNA, 21 bp, Artificial Sequence
  source: /note="Description of Artificial Sequence: Synthetic oligonucleotide"
agcacaagattcaacagcaca

SEQ ID NO: 39755 - DNA, 21 bp, Artificial Sequence
  source: /note="Description of Artificial Sequence: Synthetic oligonucleotide"
agcacaagaccaacagtcaac

SEQ ID NO: 39756 - DNA, 21 bp, Artificial Sequence
  source: /note="Description of Artificial Sequence: Synthetic oligonucleotide"
agcacaagacaactccaacaa

SEQ ID NO: 39757 - DNA, 21 bp, Artificial Sequence
  source: /note="Description of Artificial Sequence: Synthetic oligonucleotide"
agcacaagaagcgacatgtac

SEQ ID NO: 39758 - DNA, 21 bp, Artificial Sequence
  source: /note="Description of Artificial Sequence: Synthetic oligonucleotide"
agcacaagaagcatcgcagga

SEQ ID NO: 39759 - DNA, 21 bp, Artificial Sequence
  source: /note="Description of Artificial Sequence: Synthetic oligonucleotide"
agcacaagaagcgtcgaacac

SEQ ID NO: 39760 - DNA, 21 bp, Artificial Sequence
  source: /note="Description of Artificial Sequence: Synthetic oligonucleotide"
agcacaagaacagtcagcaac

SEQ ID NO: 39761 - DNA, 21 bp, Artificial Sequence
  source: /note="Description of Artificial Sequence: Synthetic oligonucleotide"
agcacaagagtcctcacaaca

SEQ ID NO: 39762 - DNA, 21 bp, Artificial Sequence
  source: /note="Description of Artificial Sequence: Synthetic oligonucleotide"
agcacaagcgcaaacctcgga

SEQ ID NO: 39763 - DNA, 21 bp, Artificial Sequence
  source: /note="Description of Artificial Sequence: Synthetic oligonucleotide"
agcacaagcgacacatggaaa

SEQ ID NO: 39764 - DNA, 21 bp, Artificial Sequence
  source: /note="Description of Artificial Sequence: Synthetic oligonucleotide"
agcacaagcgaaggactcaaa

SEQ ID NO: 39765 - DNA, 21 bp, Artificial Sequence
  source: /note="Description of Artificial Sequence: Synthetic oligonucleotide"
agcacaagcgaaatcgacaga

SEQ ID NO: 39766 - DNA, 21 bp, Artificial Sequence
  source: /note="Description of Artificial Sequence: Synthetic oligonucleotide"
agcacaagcttcgcagtcgga

SEQ ID NO: 39767 - DNA, 21 bp, Artificial Sequence
  source: /note="Description of Artificial Sequence: Synthetic oligonucleotide"
agcacaagcaaagcacaatgc

SEQ ID NO: 39768 - DNA, 21 bp, Artificial Sequence
  source: /note="Description of Artificial Sequence: Synthetic oligonucleotide"
agcacaagcaaagcacaaatc

SEQ ID NO: 39769 - DNA, 21 bp, Artificial Sequence
  source: /note="Description of Artificial Sequence: Synthetic oligonucleotide"
agcacaagcaaatacatgcac

SEQ ID NO: 39770 - DNA, 21 bp, Artificial Sequence
  source: /note="Description of Artificial Sequence: Synthetic oligonucleotide"
agcacaagcctcgcagtccaa

SEQ ID NO: 39771 - DNA, 21 bp, Artificial Sequence
  source: /note="Description of Artificial Sequence: Synthetic oligonucleotide"
agcacaagcctcggataccaa

SEQ ID NO: 39772 - DNA, 21 bp, Artificial Sequence
  source: /note="Description of Artificial Sequence: Synthetic oligonucleotide"
agcacaagcctcccaagctgc

SEQ ID NO: 39773 - DNA, 21 bp, Artificial Sequence
  source: /note="Description of Artificial Sequence: Synthetic oligonucleotide"
agcacaagcatgatgagcgca

SEQ ID NO: 39774 - DNA, 21 bp, Artificial Sequence
  source: /note="Description of Artificial Sequence: Synthetic oligonucleotide"
agcacaagcatgagcagaaca

SEQ ID NO: 39775 - DNA, 21 bp, Artificial Sequence
  source: /note="Description of Artificial Sequence: Synthetic oligonucleotide"
agcacaagccaaccactccca

SEQ ID NO: 39776 - DNA, 21 bp, Artificial Sequence
  source: /note="Description of Artificial Sequence: Synthetic oligonucleotide"
agcacaagcagaaacatgagc

SEQ ID NO: 39777 - DNA, 21 bp, Artificial Sequence
  source: /note="Description of Artificial Sequence: Synthetic oligonucleotide"
agcacaagcagcctcagcgca

SEQ ID NO: 39778 - DNA, 21 bp, Artificial Sequence
  source: /note="Description of Artificial Sequence: Synthetic oligonucleotide"
agcacaagcagcccaagacac

SEQ ID NO: 39779 - DNA, 21 bp, Artificial Sequence
  source: /note="Description of Artificial Sequence: Synthetic oligonucleotide"
agcacaagcagcagcctctac

SEQ ID NO: 39780 - DNA, 21 bp, Artificial Sequence
  source: /note="Description of Artificial Sequence: Synthetic oligonucleotide"
agcacaagcagcacactcagc

SEQ ID NO: 39781 - DNA, 21 bp, Artificial Sequence
  source: /note="Description of Artificial Sequence: Synthetic oligonucleotide"
agcacaagcacaggagcacca

SEQ ID NO: 39782 - DNA, 21 bp, Artificial Sequence
  source: /note="Description of Artificial Sequence: Synthetic oligonucleotide"
agcacaagcacactcccactc

SEQ ID NO: 39783 - DNA, 21 bp, Artificial Sequence
  source: /note="Description of Artificial Sequence: Synthetic oligonucleotide"
agcacaagcacactcgtccac

SEQ ID NO: 39784 - DNA, 21 bp, Artificial Sequence
  source: /note="Description of Artificial Sequence: Synthetic oligonucleotide"
agcacaagcgtcccaccaaaa

SEQ ID NO: 39785 - DNA, 21 bp, Artificial Sequence
  source: /note="Description of Artificial Sequence: Synthetic oligonucleotide"
agcacaagcgtcagacaaaca

SEQ ID NO: 39786 - DNA, 21 bp, Artificial Sequence
  source: /note="Description of Artificial Sequence: Synthetic oligonucleotide"
agcacaacagcaaaagcaatg

SEQ ID NO: 39787 - DNA, 21 bp, Artificial Sequence
  source: /note="Description of Artificial Sequence: Synthetic oligonucleotide"
agcacaacagcacaaacaaaa

SEQ ID NO: 39788 - DNA, 21 bp, Artificial Sequence
  source: /note="Description of Artificial Sequence: Synthetic oligonucleotide"
agcacaacagcaagaagccac

SEQ ID NO: 39789 - DNA, 21 bp, Artificial Sequence
  source: /note="Description of Artificial Sequence: Synthetic oligonucleotide"
agcacaacagacaaaccaagc

SEQ ID NO: 39790 - DNA, 21 bp, Artificial Sequence
  source: /note="Description of Artificial Sequence: Synthetic oligonucleotide"
agcacaacacacgacggaaga

SEQ ID NO: 39791 - DNA, 21 bp, Artificial Sequence
  source: /note="Description of Artificial Sequence: Synthetic oligonucleotide"
agcacaacacacggaagagac

SEQ ID NO: 39792 - DNA, 21 bp, Artificial Sequence
  source: /note="Description of Artificial Sequence: Synthetic oligonucleotide"
agcacaacactccactacgtc

SEQ ID NO: 39793 - DNA, 21 bp, Artificial Sequence
  source: /note="Description of Artificial Sequence: Synthetic oligonucleotide"
agcacaacactcaaaatgcca

SEQ ID NO: 39794 - DNA, 21 bp, Artificial Sequence
  source: /note="Description of Artificial Sequence: Synthetic oligonucleotide"
agcacaacactcaacggactc

SEQ ID NO: 39795 - DNA, 21 bp, Artificial Sequence
  source: /note="Description of Artificial Sequence: Synthetic oligonucleotide"
agcacaacactcacaccactc

SEQ ID NO: 39796 - DNA, 21 bp, Artificial Sequence
  source: /note="Description of Artificial Sequence: Synthetic oligonucleotide"
agcacaacaaacatgctcctc

SEQ ID NO: 39797 - DNA, 21 bp, Artificial Sequence
  source: /note="Description of Artificial Sequence: Synthetic oligonucleotide"
agcacaacaccaagcccaatg

SEQ ID NO: 39798 - DNA, 21 bp, Artificial Sequence
  source: /note="Description of Artificial Sequence: Synthetic oligonucleotide"
agcacaacaagaagcctcctc

SEQ ID NO: 39799 - DNA, 21 bp, Artificial Sequence
  source: /note="Description of Artificial Sequence: Synthetic oligonucleotide"
agcacaacaagaacaggagga

SEQ ID NO: 39800 - DNA, 21 bp, Artificial Sequence
  source: /note="Description of Artificial Sequence: Synthetic oligonucleotide"
agcacaacaagaacaacactc

SEQ ID NO: 39801 - DNA, 21 bp, Artificial Sequence
  source: /note="Description of Artificial Sequence: Synthetic oligonucleotide"
agcacaacaagcccaagcaga

SEQ ID NO: 39802 - DNA, 21 bp, Artificial Sequence
  source: /note="Description of Artificial Sequence: Synthetic oligonucleotide"
agcacaacaagcagagtcgaa

SEQ ID NO: 39803 - DNA, 21 bp, Artificial Sequence
  source: /note="Description of Artificial Sequence: Synthetic oligonucleotide"
agcacaacaagcacactcaca

SEQ ID NO: 39804 - DNA, 21 bp, Artificial Sequence
  source: /note="Description of Artificial Sequence: Synthetic oligonucleotide"
agcacaacagtcatcacacca

SEQ ID NO: 39805 - DNA, 21 bp, Artificial Sequence
  source: /note="Description of Artificial Sequence: Synthetic oligonucleotide"
agcacagtcatcaaaatgaac

SEQ ID NO: 39806 - DNA, 21 bp, Artificial Sequence
  source: /note="Description of Artificial Sequence: Synthetic oligonucleotide"
agcacagtcatcaacccaaca

SEQ ID NO: 39807 - DNA, 21 bp, Artificial Sequence
  source: /note="Description of Artificial Sequence: Synthetic oligonucleotide"
agcacagtcatcccaacacca

SEQ ID NO: 39808 - DNA, 21 bp, Artificial Sequence
  source: /note="Description of Artificial Sequence: Synthetic oligonucleotide"
agcacagtcctcctcacagca

SEQ ID NO: 39809 - DNA, 21 bp, Artificial Sequence
  source: /note="Description of Artificial Sequence: Synthetic oligonucleotide"
agcacagtcatgacaaaagtc

SEQ ID NO: 39810 - DNA, 21 bp, Artificial Sequence
  source: /note="Description of Artificial Sequence: Synthetic oligonucleotide"
agcacatacatgacacacagc

SEQ ID NO: 39811 - DNA, 21 bp, Artificial Sequence
  source: /note="Description of Artificial Sequence: Synthetic oligonucleotide"
agcacatacaacagcccagaa

SEQ ID NO: 39812 - DNA, 21 bp, Artificial Sequence
  source: /note="Description of Artificial Sequence: Synthetic oligonucleotide"
agcgtcgcagcacaccaacac

SEQ ID NO: 39813 - DNA, 21 bp, Artificial Sequence
  source: /note="Description of Artificial Sequence: Synthetic oligonucleotide"
agcgtcgcagcaatcaaacca

SEQ ID NO: 39814 - DNA, 21 bp, Artificial Sequence
  source: /note="Description of Artificial Sequence: Synthetic oligonucleotide"
agcgtcgcagcagtcagcctc

SEQ ID NO: 39815 - DNA, 21 bp, Artificial Sequence
  source: /note="Description of Artificial Sequence: Synthetic oligonucleotide"
agcgtcgcaggactcatcaaa

SEQ ID NO: 39816 - DNA, 21 bp, Artificial Sequence
  source: /note="Description of Artificial Sequence: Synthetic oligonucleotide"
agcgtcgcacacaacagagca

SEQ ID NO: 39817 - DNA, 21 bp, Artificial Sequence
  source: /note="Description of Artificial Sequence: Synthetic oligonucleotide"
agcgtcgcacactacggactc

SEQ ID NO: 39818 - DNA, 21 bp, Artificial Sequence
  source: /note="Description of Artificial Sequence: Synthetic oligonucleotide"
agcgtcgcaccagcaacactc

SEQ ID NO: 39819 - DNA, 21 bp, Artificial Sequence
  source: /note="Description of Artificial Sequence: Synthetic oligonucleotide"
agcgtcgcaccagtcaaagca

SEQ ID NO: 39820 - DNA, 21 bp, Artificial Sequence
  source: /note="Description of Artificial Sequence: Synthetic oligonucleotide"
agcgtcgcaagaaacagccca

SEQ ID NO: 39821 - DNA, 21 bp, Artificial Sequence
  source: /note="Description of Artificial Sequence: Synthetic oligonucleotide"
agcgtcgcaagcatgagcagc

SEQ ID NO: 39822 - DNA, 21 bp, Artificial Sequence
  source: /note="Description of Artificial Sequence: Synthetic oligonucleotide"
agcgtcgcaacagcacaaaca

SEQ ID NO: 39823 - DNA, 21 bp, Artificial Sequence
  source: /note="Description of Artificial Sequence: Synthetic oligonucleotide"
agcgtcgacgcagtcacagga

SEQ ID NO: 39824 - DNA, 21 bp, Artificial Sequence
  source: /note="Description of Artificial Sequence: Synthetic oligonucleotide"
agcgtcgacgaaggagcaaga

SEQ ID NO: 39825 - DNA, 21 bp, Artificial Sequence
  source: /note="Description of Artificial Sequence: Synthetic oligonucleotide"
agcgtcgacccacacaaccca

SEQ ID NO: 39826 - DNA, 21 bp, Artificial Sequence
  source: /note="Description of Artificial Sequence: Synthetic oligonucleotide"
agcgtcgacagcagcatcatc

SEQ ID NO: 39827 - DNA, 21 bp, Artificial Sequence
  source: /note="Description of Artificial Sequence: Synthetic oligonucleotide"
agcgtcgacacaggacacagc

SEQ ID NO: 39828 - DNA, 21 bp, Artificial Sequence
  source: /note="Description of Artificial Sequence: Synthetic oligonucleotide"
agcgtcgactacgtcggagtc

SEQ ID NO: 39829 - DNA, 21 bp, Artificial Sequence
  source: /note="Description of Artificial Sequence: Synthetic oligonucleotide"
agcgtcgaattcagcgacgca

SEQ ID NO: 39830 - DNA, 21 bp, Artificial Sequence
  source: /note="Description of Artificial Sequence: Synthetic oligonucleotide"
agcgtcgaaaaagacgaccac

SEQ ID NO: 39831 - DNA, 21 bp, Artificial Sequence
  source: /note="Description of Artificial Sequence: Synthetic oligonucleotide"
agcgtcgaaacaggaagagtc

SEQ ID NO: 39832 - DNA, 21 bp, Artificial Sequence
  source: /note="Description of Artificial Sequence: Synthetic oligonucleotide"
agcgtcgaaacaacaaactac

SEQ ID NO: 39833 - DNA, 21 bp, Artificial Sequence
  source: /note="Description of Artificial Sequence: Synthetic oligonucleotide"
agcgtcgaagtcagcagagca

SEQ ID NO: 39834 - DNA, 21 bp, Artificial Sequence
  source: /note="Description of Artificial Sequence: Synthetic oligonucleotide"
agcgtcttcaaatgcgaacca

SEQ ID NO: 39835 - DNA, 21 bp, Artificial Sequence
  source: /note="Description of Artificial Sequence: Synthetic oligonucleotide"
agcgtcttcccacacagcgca

SEQ ID NO: 39836 - DNA, 21 bp, Artificial Sequence
  source: /note="Description of Artificial Sequence: Synthetic oligonucleotide"
agcgtcttcccactcccacac

SEQ ID NO: 39837 - DNA, 21 bp, Artificial Sequence
  source: /note="Description of Artificial Sequence: Synthetic oligonucleotide"
agcgtcggagacaacggaagc

SEQ ID NO: 39838 - DNA, 21 bp, Artificial Sequence
  source: /note="Description of Artificial Sequence: Synthetic oligonucleotide"
agcgtcggactccaactcgaa

SEQ ID NO: 39839 - DNA, 21 bp, Artificial Sequence
  source: /note="Description of Artificial Sequence: Synthetic oligonucleotide"
agcgtcggaagcgcaatggaa

SEQ ID NO: 39840 - DNA, 21 bp, Artificial Sequence
  source: /note="Description of Artificial Sequence: Synthetic oligonucleotide"
agcgtcggaagctacagccca

SEQ ID NO: 39841 - DNA, 21 bp, Artificial Sequence
  source: /note="Description of Artificial Sequence: Synthetic oligonucleotide"
agcgtcggaagctacgtcgac

SEQ ID NO: 39842 - DNA, 21 bp, Artificial Sequence
  source: /note="Description of Artificial Sequence: Synthetic oligonucleotide"
agcgtcggaacaaaagacgac

SEQ ID NO: 39843 - DNA, 21 bp, Artificial Sequence
  source: /note="Description of Artificial Sequence: Synthetic oligonucleotide"
agcgtccacgaccacagaagc

SEQ ID NO: 39844 - DNA, 21 bp, Artificial Sequence
  source: /note="Description of Artificial Sequence: Synthetic oligonucleotide"
agcgtccacgaacacagcatg

SEQ ID NO: 39845 - DNA, 21 bp, Artificial Sequence
  source: /note="Description of Artificial Sequence: Synthetic oligonucleotide"
agcgtccacccaaaccaagca

SEQ ID NO: 39846 - DNA, 21 bp, Artificial Sequence
  source: /note="Description of Artificial Sequence: Synthetic oligonucleotide"
agcgtcatcctcagagcaaca

SEQ ID NO: 39847 - DNA, 21 bp, Artificial Sequence
  source: /note="Description of Artificial Sequence: Synthetic oligonucleotide"
agcgtcatcaacagcagagga

SEQ ID NO: 39848 - DNA, 21 bp, Artificial Sequence
  source: /note="Description of Artificial Sequence: Synthetic oligonucleotide"
agcgtcatcagcagaagcgaa

SEQ ID NO: 39849 - DNA, 21 bp, Artificial Sequence
  source: /note="Description of Artificial Sequence: Synthetic oligonucleotide"
agcgtcatcacatgggaagac

SEQ ID NO: 39850 - DNA, 21 bp, Artificial Sequence
  source: /note="Description of Artificial Sequence: Synthetic oligonucleotide"
agcgtcaaaccactcaaccac

SEQ ID NO: 39851 - DNA, 21 bp, Artificial Sequence
  source: /note="Description of Artificial Sequence: Synthetic oligonucleotide"
agcgtcaaagtcctcagacca

SEQ ID NO: 39852 - DNA, 21 bp, Artificial Sequence
  source: /note="Description of Artificial Sequence: Synthetic oligonucleotide"
agcgtcctcgacggaccacca

SEQ ID NO: 39853 - DNA, 21 bp, Artificial Sequence
  source: /note="Description of Artificial Sequence: Synthetic oligonucleotide"
agcgtcctcaacctcccaagc

SEQ ID NO: 39854 - DNA, 21 bp, Artificial Sequence
  source: /note="Description of Artificial Sequence: Synthetic oligonucleotide"
agcgtcctcccagaaccaagc

SEQ ID NO: 39855 - DNA, 21 bp, Artificial Sequence
  source: /note="Description of Artificial Sequence: Synthetic oligonucleotide"
agcgtcctcagacacccaaca

SEQ ID NO: 39856 - DNA, 21 bp, Artificial Sequence
  source: /note="Description of Artificial Sequence: Synthetic oligonucleotide"
agcgtcctcagaacaacacca

SEQ ID NO: 39857 - DNA, 21 bp, Artificial Sequence
  source: /note="Description of Artificial Sequence: Synthetic oligonucleotide"
agcgtcctcagcgcagtccca

SEQ ID NO: 39858 - DNA, 21 bp, Artificial Sequence
  source: /note="Description of Artificial Sequence: Synthetic oligonucleotide"
agcgtcctcagcatcgacaga

SEQ ID NO: 39859 - DNA, 21 bp, Artificial Sequence
  source: /note="Description of Artificial Sequence: Synthetic oligonucleotide"
agcgtcctcagcagcagcgtc

SEQ ID NO: 39860 - DNA, 21 bp, Artificial Sequence
  source: /note="Description of Artificial Sequence: Synthetic oligonucleotide"
agcgtcatggcaaaccaagca

SEQ ID NO: 39861 - DNA, 21 bp, Artificial Sequence
  source: /note="Description of Artificial Sequence: Synthetic oligonucleotide"
agcgtcatgccaaaaccacaa

SEQ ID NO: 39862 - DNA, 21 bp, Artificial Sequence
  source: /note="Description of Artificial Sequence: Synthetic oligonucleotide"
agcgtcaacgcaacaagagga

SEQ ID NO: 39863 - DNA, 21 bp, Artificial Sequence
  source: /note="Description of Artificial Sequence: Synthetic oligonucleotide"
agcgtcaacggaaacgacgtc

SEQ ID NO: 39864 - DNA, 21 bp, Artificial Sequence
  source: /note="Description of Artificial Sequence: Synthetic oligonucleotide"
agcgtcaacggaagctggaaa

SEQ ID NO: 39865 - DNA, 21 bp, Artificial Sequence
  source: /note="Description of Artificial Sequence: Synthetic oligonucleotide"
agcgtcccagaatacaacgga

SEQ ID NO: 39866 - DNA, 21 bp, Artificial Sequence
  source: /note="Description of Artificial Sequence: Synthetic oligonucleotide"
agcgtcccaggaacaggaagc

SEQ ID NO: 39867 - DNA, 21 bp, Artificial Sequence
  source: /note="Description of Artificial Sequence: Synthetic oligonucleotide"
agcgtcccacacacaagcaca

SEQ ID NO: 39868 - DNA, 21 bp, Artificial Sequence
  source: /note="Description of Artificial Sequence: Synthetic oligonucleotide"
agcgtcccacaaatgtacagc

SEQ ID NO: 39869 - DNA, 21 bp, Artificial Sequence
  source: /note="Description of Artificial Sequence: Synthetic oligonucleotide"
agcgtcccaagcgcaagcaaa

SEQ ID NO: 39870 - DNA, 21 bp, Artificial Sequence
  source: /note="Description of Artificial Sequence: Synthetic oligonucleotide"
agcgtcccaagcagcacaaga

SEQ ID NO: 39871 - DNA, 21 bp, Artificial Sequence
  source: /note="Description of Artificial Sequence: Synthetic oligonucleotide"
agcgtcccagtcacaccagga

SEQ ID NO: 39872 - DNA, 21 bp, Artificial Sequence
  source: /note="Description of Artificial Sequence: Synthetic oligonucleotide"
agcgtcccatacgtcggaaca

SEQ ID NO: 39873 - DNA, 21 bp, Artificial Sequence
  source: /note="Description of Artificial Sequence: Synthetic oligonucleotide"
agcgtccaaagagaagaaaga

SEQ ID NO: 39874 - DNA, 21 bp, Artificial Sequence
  source: /note="Description of Artificial Sequence: Synthetic oligonucleotide"
agcgtccaaagaggagtcgac

SEQ ID NO: 39875 - DNA, 21 bp, Artificial Sequence
  source: /note="Description of Artificial Sequence: Synthetic oligonucleotide"
agcgtccaaacaagaccagaa

SEQ ID NO: 39876 - DNA, 21 bp, Artificial Sequence
  source: /note="Description of Artificial Sequence: Synthetic oligonucleotide"
agcgtccaagtcggataccac

SEQ ID NO: 39877 - DNA, 21 bp, Artificial Sequence
  source: /note="Description of Artificial Sequence: Synthetic oligonucleotide"
agcgtcagagcagaaagcgca

SEQ ID NO: 39878 - DNA, 21 bp, Artificial Sequence
  source: /note="Description of Artificial Sequence: Synthetic oligonucleotide"
agcgtcagacacgtcgaacca

SEQ ID NO: 39879 - DNA, 21 bp, Artificial Sequence
  source: /note="Description of Artificial Sequence: Synthetic oligonucleotide"
agcgtcagaagcgcaagccaa

SEQ ID NO: 39880 - DNA, 21 bp, Artificial Sequence
  source: /note="Description of Artificial Sequence: Synthetic oligonucleotide"
agcgtcagaagcctcagccca

SEQ ID NO: 39881 - DNA, 21 bp, Artificial Sequence
  source: /note="Description of Artificial Sequence: Synthetic oligonucleotide"
agcgtcagaagcaaccacgca

SEQ ID NO: 39882 - DNA, 21 bp, Artificial Sequence
  source: /note="Description of Artificial Sequence: Synthetic oligonucleotide"
agcgtcagaacaaaagacagc

SEQ ID NO: 39883 - DNA, 21 bp, Artificial Sequence
  source: /note="Description of Artificial Sequence: Synthetic oligonucleotide"
agcgtcagcttcagcagcagc

SEQ ID NO: 39884 - DNA, 21 bp, Artificial Sequence
  source: /note="Description of Artificial Sequence: Synthetic oligonucleotide"
agcgtcagcggagcagcagca

SEQ ID NO: 39885 - DNA, 21 bp, Artificial Sequence
  source: /note="Description of Artificial Sequence: Synthetic oligonucleotide"
agcgtcagccacaacgcacca

SEQ ID NO: 39886 - DNA, 21 bp, Artificial Sequence
  source: /note="Description of Artificial Sequence: Synthetic oligonucleotide"
agcgtcagcaaagaaggaaca

SEQ ID NO: 39887 - DNA, 21 bp, Artificial Sequence
  source: /note="Description of Artificial Sequence: Synthetic oligonucleotide"
agcgtcagcctcgcagaccca

SEQ ID NO: 39888 - DNA, 21 bp, Artificial Sequence
  source: /note="Description of Artificial Sequence: Synthetic oligonucleotide"
agcgtcagcctcgaactctac

SEQ ID NO: 39889 - DNA, 21 bp, Artificial Sequence
  source: /note="Description of Artificial Sequence: Synthetic oligonucleotide"
agcgtcagcctcggaccaaaa

SEQ ID NO: 39890 - DNA, 21 bp, Artificial Sequence
  source: /note="Description of Artificial Sequence: Synthetic oligonucleotide"
agcgtcagcccacaccaagca

SEQ ID NO: 39891 - DNA, 21 bp, Artificial Sequence
  source: /note="Description of Artificial Sequence: Synthetic oligonucleotide"
agcgtcagcagaatggtcgca

SEQ ID NO: 39892 - DNA, 21 bp, Artificial Sequence
  source: /note="Description of Artificial Sequence: Synthetic oligonucleotide"
agcgtcagcagaccagcactc

SEQ ID NO: 39893 - DNA, 21 bp, Artificial Sequence
  source: /note="Description of Artificial Sequence: Synthetic oligonucleotide"
agcgtcagcagacaacaaatc

SEQ ID NO: 39894 - DNA, 21 bp, Artificial Sequence
  source: /note="Description of Artificial Sequence: Synthetic oligonucleotide"
agcgtcagcagccaaaacaca

SEQ ID NO: 39895 - DNA, 21 bp, Artificial Sequence
  source: /note="Description of Artificial Sequence: Synthetic oligonucleotide"
agcgtcagcagcagccaactc

SEQ ID NO: 39896 - DNA, 21 bp, Artificial Sequence
  source: /note="Description of Artificial Sequence: Synthetic oligonucleotide"
agcgtcagcacagcaaaccca

SEQ ID NO: 39897 - DNA, 21 bp, Artificial Sequence
  source: /note="Description of Artificial Sequence: Synthetic oligonucleotide"
agcgtcagcacactcccaatg

SEQ ID NO: 39898 - DNA, 21 bp, Artificial Sequence
  source: /note="Description of Artificial Sequence: Synthetic oligonucleotide"
agcgtcagcacaaacaaatac

SEQ ID NO: 39899 - DNA, 21 bp, Artificial Sequence
  source: /note="Description of Artificial Sequence: Synthetic oligonucleotide"
agcgtcagcgtcgactacatg

SEQ ID NO: 39900 - DNA, 21 bp, Artificial Sequence
  source: /note="Description of Artificial Sequence: Synthetic oligonucleotide"
agcgtcacagcaaaaacatac

SEQ ID NO: 39901 - DNA, 21 bp, Artificial Sequence
  source: /note="Description of Artificial Sequence: Synthetic oligonucleotide"
agcgtcacagacggagtcctc

SEQ ID NO: 39902 - DNA, 21 bp, Artificial Sequence
  source: /note="Description of Artificial Sequence: Synthetic oligonucleotide"
agcgtcacagaacacgtcatc

SEQ ID NO: 39903 - DNA, 21 bp, Artificial Sequence
  source: /note="Description of Artificial Sequence: Synthetic oligonucleotide"
agcgtcacaggagcaaacaca

SEQ ID NO: 39904 - DNA, 21 bp, Artificial Sequence
  source: /note="Description of Artificial Sequence: Synthetic oligonucleotide"
agcgtcacacacctcttcaaa

SEQ ID NO: 39905 - DNA, 21 bp, Artificial Sequence
  source: /note="Description of Artificial Sequence: Synthetic oligonucleotide"
agcgtcacaccaacaagagca

SEQ ID NO: 39906 - DNA, 21 bp, Artificial Sequence
  source: /note="Description of Artificial Sequence: Synthetic oligonucleotide"
agcgtcacacaaatgttcaaa

SEQ ID NO: 39907 - DNA, 21 bp, Artificial Sequence
  source: /note="Description of Artificial Sequence: Synthetic oligonucleotide"
agcgtcacaagagcaccatac

SEQ ID NO: 39908 - DNA, 21 bp, Artificial Sequence
  source: /note="Description of Artificial Sequence: Synthetic oligonucleotide"
agcgtcacaacaagagcaatc

SEQ ID NO: 39909 - DNA, 21 bp, Artificial Sequence
  source: /note="Description of Artificial Sequence: Synthetic oligonucleotide"
agcgtcgtcgcagcagtcatc

SEQ ID NO: 39910 - DNA, 21 bp, Artificial Sequence
  source: /note="Description of Artificial Sequence: Synthetic oligonucleotide"
agcgtcgtcggaacacacgca

SEQ ID NO: 39911 - DNA, 21 bp, Artificial Sequence
  source: /note="Description of Artificial Sequence: Synthetic oligonucleotide"
agcgtcgtcccacacgacctc

SEQ ID NO: 39912 - DNA, 21 bp, Artificial Sequence
  source: /note="Description of Artificial Sequence: Synthetic oligonucleotide"
agcgtcgtcagaaaagaagca

SEQ ID NO: 39913 - DNA, 21 bp, Artificial Sequence
  source: /note="Description of Artificial Sequence: Synthetic oligonucleotide"
agcgtcgtcagcagactcgga

SEQ ID NO: 39914 - DNA, 21 bp, Artificial Sequence
  source: /note="Description of Artificial Sequence: Synthetic oligonucleotide"
agcgtcgtcagcagccaagga

SEQ ID NO: 39915 - DNA, 21 bp, Artificial Sequence
  source: /note="Description of Artificial Sequence: Synthetic oligonucleotide"
agcgtctacacacaagcacca

SEQ ID NO: 39916 - DNA, 21 bp, Artificial Sequence
  source: /note="Description of Artificial Sequence: Synthetic oligonucleotide"
agctgggacgcaagcgcactc

SEQ ID NO: 39917 - DNA, 21 bp, Artificial Sequence
  source: /note="Description of Artificial Sequence: Synthetic oligonucleotide"
agctggggagcaaaagaagga

SEQ ID NO: 39918 - DNA, 21 bp, Artificial Sequence
  source: /note="Description of Artificial Sequence: Synthetic oligonucleotide"
agctggggagaaacagcaaaa

SEQ ID NO: 39919 - DNA, 21 bp, Artificial Sequence
  source: /note="Description of Artificial Sequence: Synthetic oligonucleotide"
agctggcacaacagccaacca

SEQ ID NO: 39920 - DNA, 21 bp, Artificial Sequence
  source: /note="Description of Artificial Sequence: Synthetic oligonucleotide"
agctggccaagcaacggagtc

SEQ ID NO: 39921 - DNA, 21 bp, Artificial Sequence
  source: /note="Description of Artificial Sequence: Synthetic oligonucleotide"
agctggcaaacaagcatcgca

SEQ ID NO: 39922 - DNA, 21 bp, Artificial Sequence
  source: /note="Description of Artificial Sequence: Synthetic oligonucleotide"
agctggagagacgtcccacca

SEQ ID NO: 39923 - DNA, 21 bp, Artificial Sequence
  source: /note="Description of Artificial Sequence: Synthetic oligonucleotide"
agctggagccacgaacaagaa

SEQ ID NO: 39924 - DNA, 21 bp, Artificial Sequence
  source: /note="Description of Artificial Sequence: Synthetic oligonucleotide"
agctacgcaaaaagcctcgac

SEQ ID NO: 39925 - DNA, 21 bp, Artificial Sequence
  source: /note="Description of Artificial Sequence: Synthetic oligonucleotide"
agctacgcaagaacaagcctc

SEQ ID NO: 39926 - DNA, 21 bp, Artificial Sequence
  source: /note="Description of Artificial Sequence: Synthetic oligonucleotide"
agctacgcaagcctcacacca

SEQ ID NO: 39927 - DNA, 21 bp, Artificial Sequence
  source: /note="Description of Artificial Sequence: Synthetic oligonucleotide"
agctacgcaagcagaacagtc

SEQ ID NO: 39928 - DNA, 21 bp, Artificial Sequence
  source: /note="Description of Artificial Sequence: Synthetic oligonucleotide"
agctacgcaacaagcctcaca

SEQ ID NO: 39929 - DNA, 21 bp, Artificial Sequence
  source: /note="Description of Artificial Sequence: Synthetic oligonucleotide"
agctacgacagaagcccagca

SEQ ID NO: 39930 - DNA, 21 bp, Artificial Sequence
  source: /note="Description of Artificial Sequence: Synthetic oligonucleotide"
agctacgaagcaagcaaatac

SEQ ID NO: 39931 - DNA, 21 bp, Artificial Sequence
  source: /note="Description of Artificial Sequence: Synthetic oligonucleotide"
agctacgaagacgacagctgc

SEQ ID NO: 39932 - DNA, 21 bp, Artificial Sequence
  source: /note="Description of Artificial Sequence: Synthetic oligonucleotide"
agctacgaaccaaacaaactc

SEQ ID NO: 39933 - DNA, 21 bp, Artificial Sequence
  source: /note="Description of Artificial Sequence: Synthetic oligonucleotide"
agctacggaggaacactcctc

SEQ ID NO: 39934 - DNA, 21 bp, Artificial Sequence
  source: /note="Description of Artificial Sequence: Synthetic oligonucleotide"
agctacggaaaagaatacgtc

SEQ ID NO: 39935 - DNA, 21 bp, Artificial Sequence
  source: /note="Description of Artificial Sequence: Synthetic oligonucleotide"
agctacggactcccagcatac

SEQ ID NO: 39936 - DNA, 21 bp, Artificial Sequence
  source: /note="Description of Artificial Sequence: Synthetic oligonucleotide"
agctacggaccaatcaaaaca

SEQ ID NO: 39937 - DNA, 21 bp, Artificial Sequence
  source: /note="Description of Artificial Sequence: Synthetic oligonucleotide"
agctacggaagaggagcagaa

SEQ ID NO: 39938 - DNA, 21 bp, Artificial Sequence
  source: /note="Description of Artificial Sequence: Synthetic oligonucleotide"
agctacggaagcggacaaatc

SEQ ID NO: 39939 - DNA, 21 bp, Artificial Sequence
  source: /note="Description of Artificial Sequence: Synthetic oligonucleotide"
agctacggaagcaaactccca

SEQ ID NO: 39940 - DNA, 21 bp, Artificial Sequence
  source: /note="Description of Artificial Sequence: Synthetic oligonucleotide"
agctacggaacagcaccaatc

SEQ ID NO: 39941 - DNA, 21 bp, Artificial Sequence
  source: /note="Description of Artificial Sequence: Synthetic oligonucleotide"
agctacggagtcccaagacca

SEQ ID NO: 39942 - DNA, 21 bp, Artificial Sequence
  source: /note="Description of Artificial Sequence: Synthetic oligonucleotide"
agctaccacccaaaactcaac

SEQ ID NO: 39943 - DNA, 21 bp, Artificial Sequence
  source: /note="Description of Artificial Sequence: Synthetic oligonucleotide"
agctacatcccaagcacaatc

SEQ ID NO: 39944 - DNA, 21 bp, Artificial Sequence
  source: /note="Description of Artificial Sequence: Synthetic oligonucleotide"
agctacatcagagaagaccca

SEQ ID NO: 39945 - DNA, 21 bp, Artificial Sequence
  source: /note="Description of Artificial Sequence: Synthetic oligonucleotide"
agctacaaaggaagctacatg

SEQ ID NO: 39946 - DNA, 21 bp, Artificial Sequence
  source: /note="Description of Artificial Sequence: Synthetic oligonucleotide"
agctacaaacacatgccacca

SEQ ID NO: 39947 - DNA, 21 bp, Artificial Sequence
  source: /note="Description of Artificial Sequence: Synthetic oligonucleotide"
agctacaaaagccaaatcgca

SEQ ID NO: 39948 - DNA, 21 bp, Artificial Sequence
  source: /note="Description of Artificial Sequence: Synthetic oligonucleotide"
agctacctcggaatcgcacca

SEQ ID NO: 39949 - DNA, 21 bp, Artificial Sequence
  source: /note="Description of Artificial Sequence: Synthetic oligonucleotide"
agctacctcaacccaatgaac

SEQ ID NO: 39950 - DNA, 21 bp, Artificial Sequence
  source: /note="Description of Artificial Sequence: Synthetic oligonucleotide"
agctacctcccaccagcacca

SEQ ID NO: 39951 - DNA, 21 bp, Artificial Sequence
  source: /note="Description of Artificial Sequence: Synthetic oligonucleotide"
agctacatggcaagcctccca

SEQ ID NO: 39952 - DNA, 21 bp, Artificial Sequence
  source: /note="Description of Artificial Sequence: Synthetic oligonucleotide"
agctacatgccacaaacagtc

SEQ ID NO: 39953 - DNA, 21 bp, Artificial Sequence
  source: /note="Description of Artificial Sequence: Synthetic oligonucleotide"
agctacatgagcccagtcagc

SEQ ID NO: 39954 - DNA, 21 bp, Artificial Sequence
  source: /note="Description of Artificial Sequence: Synthetic oligonucleotide"
agctacatgacaaaagacctc

SEQ ID NO: 39955 - DNA, 21 bp, Artificial Sequence
  source: /note="Description of Artificial Sequence: Synthetic oligonucleotide"
agctacccagcaaaaccaagc

SEQ ID NO: 39956 - DNA, 21 bp, Artificial Sequence
  source: /note="Description of Artificial Sequence: Synthetic oligonucleotide"
agctacccagcaagcagcaga

SEQ ID NO: 39957 - DNA, 21 bp, Artificial Sequence
  source: /note="Description of Artificial Sequence: Synthetic oligonucleotide"
agctacccaaaaagctacgaa

SEQ ID NO: 39958 - DNA, 21 bp, Artificial Sequence
  source: /note="Description of Artificial Sequence: Synthetic oligonucleotide"
agctacccagtcagcgtccca

SEQ ID NO: 39959 - DNA, 21 bp, Artificial Sequence
  source: /note="Description of Artificial Sequence: Synthetic oligonucleotide"
agctaccaagcaatcagcaca

SEQ ID NO: 39960 - DNA, 21 bp, Artificial Sequence
  source: /note="Description of Artificial Sequence: Synthetic oligonucleotide"
agctacagaccagaaagcgga

SEQ ID NO: 39961 - DNA, 21 bp, Artificial Sequence
  source: /note="Description of Artificial Sequence: Synthetic oligonucleotide"
agctacagaccagaaacaaac

SEQ ID NO: 39962 - DNA, 21 bp, Artificial Sequence
  source: /note="Description of Artificial Sequence: Synthetic oligonucleotide"
agctacagagtcaacacagga

SEQ ID NO: 39963 - DNA, 21 bp, Artificial Sequence
  source: /note="Description of Artificial Sequence: Synthetic oligonucleotide"
agctacagcgcaagcgaattc

SEQ ID NO: 39964 - DNA, 21 bp, Artificial Sequence
  source: /note="Description of Artificial Sequence: Synthetic oligonucleotide"
agctacagcgcaacaacagtc

SEQ ID NO: 39965 - DNA, 21 bp, Artificial Sequence
  source: /note="Description of Artificial Sequence: Synthetic oligonucleotide"
agctacagcggaggatgcctc

SEQ ID NO: 39966 - DNA, 21 bp, Artificial Sequence
  source: /note="Description of Artificial Sequence: Synthetic oligonucleotide"
agctacagccacctcagcgga

SEQ ID NO: 39967 - DNA, 21 bp, Artificial Sequence
  source: /note="Description of Artificial Sequence: Synthetic oligonucleotide"
agctacagcatggcacaccca

SEQ ID NO: 39968 - DNA, 21 bp, Artificial Sequence
  source: /note="Description of Artificial Sequence: Synthetic oligonucleotide"
agctacagcagcgacagaagc

SEQ ID NO: 39969 - DNA, 21 bp, Artificial Sequence
  source: /note="Description of Artificial Sequence: Synthetic oligonucleotide"
agctacacagacgcagcactc

SEQ ID NO: 39970 - DNA, 21 bp, Artificial Sequence
  source: /note="Description of Artificial Sequence: Synthetic oligonucleotide"
agctacacacacgtcagcgga

SEQ ID NO: 39971 - DNA, 21 bp, Artificial Sequence
  source: /note="Description of Artificial Sequence: Synthetic oligonucleotide"
agctacacaaaagacgtcgac

SEQ ID NO: 39972 - DNA, 21 bp, Artificial Sequence
  source: /note="Description of Artificial Sequence: Synthetic oligonucleotide"
agctacacaaaaagcgcacca

SEQ ID NO: 39973 - DNA, 21 bp, Artificial Sequence
  source: /note="Description of Artificial Sequence: Synthetic oligonucleotide"
agctacacaagcccaagcagc

SEQ ID NO: 39974 - DNA, 21 bp, Artificial Sequence
  source: /note="Description of Artificial Sequence: Synthetic oligonucleotide"
agctacacagtcgacagccac

SEQ ID NO: 39975 - DNA, 21 bp, Artificial Sequence
  source: /note="Description of Artificial Sequence: Synthetic oligonucleotide"
agctacgtcaaaccagcagaa

SEQ ID NO: 39976 - DNA, 21 bp, Artificial Sequence
  source: /note="Description of Artificial Sequence: Synthetic oligonucleotide"
agctacgtcaacaacccagga

SEQ ID NO: 39977 - DNA, 21 bp, Artificial Sequence
  source: /note="Description of Artificial Sequence: Synthetic oligonucleotide"
agctacgtcagaccaacaagc

SEQ ID NO: 39978 - DNA, 21 bp, Artificial Sequence
  source: /note="Description of Artificial Sequence: Synthetic oligonucleotide"
agctacgtcagcggagcagca

SEQ ID NO: 39979 - DNA, 21 bp, Artificial Sequence
  source: /note="Description of Artificial Sequence: Synthetic oligonucleotide"
acagcagcagcagacagagtc

SEQ ID NO: 39980 - DNA, 21 bp, Artificial Sequence
  source: /note="Description of Artificial Sequence: Synthetic oligonucleotide"
acagcagcagcaagcaacaga

SEQ ID NO: 39981 - DNA, 21 bp, Artificial Sequence
  source: /note="Description of Artificial Sequence: Synthetic oligonucleotide"
acagcagcagcaagcgtcaga

SEQ ID NO: 39982 - DNA, 21 bp, Artificial Sequence
  source: /note="Description of Artificial Sequence: Synthetic oligonucleotide"
acagcagcagacaacgacgaa

SEQ ID NO: 39983 - DNA, 21 bp, Artificial Sequence
  source: /note="Description of Artificial Sequence: Synthetic oligonucleotide"
acagcagcattcgacagagtc

SEQ ID NO: 39984 - DNA, 21 bp, Artificial Sequence
  source: /note="Description of Artificial Sequence: Synthetic oligonucleotide"
acagcagcacacctcggaaac

SEQ ID NO: 39985 - DNA, 21 bp, Artificial Sequence
  source: /note="Description of Artificial Sequence: Synthetic oligonucleotide"
acagcagcaaaaagcgcagga

SEQ ID NO: 39986 - DNA, 21 bp, Artificial Sequence
  source: /note="Description of Artificial Sequence: Synthetic oligonucleotide"
acagcagcactcacaggacac

SEQ ID NO: 39987 - DNA, 21 bp, Artificial Sequence
  source: /note="Description of Artificial Sequence: Synthetic oligonucleotide"
acagcagcaagattcgcagca

SEQ ID NO: 39988 - DNA, 21 bp, Artificial Sequence
  source: /note="Description of Artificial Sequence: Synthetic oligonucleotide"
acagcagcaagaagcagcgac

SEQ ID NO: 39989 - DNA, 21 bp, Artificial Sequence
  source: /note="Description of Artificial Sequence: Synthetic oligonucleotide"
acagcagcaagccacagcaca

SEQ ID NO: 39990 - DNA, 21 bp, Artificial Sequence
  source: /note="Description of Artificial Sequence: Synthetic oligonucleotide"
acagcagcaacaaacgtcaac

SEQ ID NO: 39991 - DNA, 21 bp, Artificial Sequence
  source: /note="Description of Artificial Sequence: Synthetic oligonucleotide"
acagcagcagtcacaaacaca

SEQ ID NO: 39992 - DNA, 21 bp, Artificial Sequence
  source: /note="Description of Artificial Sequence: Synthetic oligonucleotide"
acagcagacagaatgatgagc

SEQ ID NO: 39993 - DNA, 21 bp, Artificial Sequence
  source: /note="Description of Artificial Sequence: Synthetic oligonucleotide"
acagcagaacacacaagattc

SEQ ID NO: 39994 - DNA, 21 bp, Artificial Sequence
  source: /note="Description of Artificial Sequence: Synthetic oligonucleotide"
acagcagaaaacctcagccca

SEQ ID NO: 39995 - DNA, 21 bp, Artificial Sequence
  source: /note="Description of Artificial Sequence: Synthetic oligonucleotide"
acagcagaaccagtcagaaca

SEQ ID NO: 39996 - DNA, 21 bp, Artificial Sequence
  source: /note="Description of Artificial Sequence: Synthetic oligonucleotide"
acagcattccaaacaatcgaa

SEQ ID NO: 39997 - DNA, 21 bp, Artificial Sequence
  source: /note="Description of Artificial Sequence: Synthetic oligonucleotide"
acagcattcagaatggactac

SEQ ID NO: 39998 - DNA, 21 bp, Artificial Sequence
  source: /note="Description of Artificial Sequence: Synthetic oligonucleotide"
acagcaggaggacaaccactc

SEQ ID NO: 39999 - DNA, 21 bp, Artificial Sequence
  source: /note="Description of Artificial Sequence: Synthetic oligonucleotide"
acagcaggaggaacaacacca

SEQ ID NO: 40000 - DNA, 21 bp, Artificial Sequence
  source: /note="Description of Artificial Sequence: Synthetic oligonucleotide"
acagcaggactcggagtccca

SEQ ID NO: 40001 - DNA, 21 bp, Artificial Sequence
  source: /note="Description of Artificial Sequence: Synthetic oligonucleotide"
acagcaggaaacctcatccca

SEQ ID NO: 40002 - DNA, 21 bp, Artificial Sequence
  source: /note="Description of Artificial Sequence: Synthetic oligonucleotide"
acagcaggaccacacagagtc

SEQ ID NO: 40003 - DNA, 21 bp, Artificial Sequence
  source: /note="Description of Artificial Sequence: Synthetic oligonucleotide"
acagcaggagtcccagcaatc

SEQ ID NO: 40004 - DNA, 21 bp, Artificial Sequence
  source: /note="Description of Artificial Sequence: Synthetic oligonucleotide"
acagcacacgaagaaagaaac

SEQ ID NO: 40005 - DNA, 21 bp, Artificial Sequence
  source: /note="Description of Artificial Sequence: Synthetic oligonucleotide"
acagcacacttcagcgcaaca

SEQ ID NO: 40006 - DNA, 21 bp, Artificial Sequence
  source: /note="Description of Artificial Sequence: Synthetic oligonucleotide"
acagcacacccattcccacca

SEQ ID NO: 40007 - DNA, 21 bp, Artificial Sequence
  source: /note="Description of Artificial Sequence: Synthetic oligonucleotide"
acagcacaccaactcatcgca

SEQ ID NO: 40008 - DNA, 21 bp, Artificial Sequence
  source: /note="Description of Artificial Sequence: Synthetic oligonucleotide"
acagcacacagcctccaaagc

SEQ ID NO: 40009 - DNA, 21 bp, Artificial Sequence
  source: /note="Description of Artificial Sequence: Synthetic oligonucleotide"
acagcacacagctacgcacac

SEQ ID NO: 40010 - DNA, 21 bp, Artificial Sequence
  source: /note="Description of Artificial Sequence: Synthetic oligonucleotide"
acagcacacgtcttcccagca

SEQ ID NO: 40011 - DNA, 21 bp, Artificial Sequence
  source: /note="Description of Artificial Sequence: Synthetic oligonucleotide"
acagcaatcggaatcagccca

SEQ ID NO: 40012 - DNA, 21 bp, Artificial Sequence
  source: /note="Description of Artificial Sequence: Synthetic oligonucleotide"
acagcaatcccattcccagca

SEQ ID NO: 40013 - DNA, 21 bp, Artificial Sequence
  source: /note="Description of Artificial Sequence: Synthetic oligonucleotide"
acagcaatcagcagcagagca

SEQ ID NO: 40014 - DNA, 21 bp, Artificial Sequence
  source: /note="Description of Artificial Sequence: Synthetic oligonucleotide"
acagcaaaagcaacagtcgaa

SEQ ID NO: 40015 - DNA, 21 bp, Artificial Sequence
  source: /note="Description of Artificial Sequence: Synthetic oligonucleotide"
acagcaaaaagcagcaacaac

SEQ ID NO: 40016 - DNA, 21 bp, Artificial Sequence
  source: /note="Description of Artificial Sequence: Synthetic oligonucleotide"
acagcaaaaacaagcgcaatc

SEQ ID NO: 40017 - DNA, 21 bp, Artificial Sequence
  source: /note="Description of Artificial Sequence: Synthetic oligonucleotide"
acagcaaaatacgaccacctc

SEQ ID NO: 40018 - DNA, 21 bp, Artificial Sequence
  source: /note="Description of Artificial Sequence: Synthetic oligonucleotide"
acagcactcttccaagacgca

SEQ ID NO: 40019 - DNA, 21 bp, Artificial Sequence
  source: /note="Description of Artificial Sequence: Synthetic oligonucleotide"
acagcactccacgcagacgtc

SEQ ID NO: 40020 - DNA, 21 bp, Artificial Sequence
  source: /note="Description of Artificial Sequence: Synthetic oligonucleotide"
acagcactccactacagcgaa

SEQ ID NO: 40021 - DNA, 21 bp, Artificial Sequence
  source: /note="Description of Artificial Sequence: Synthetic oligonucleotide"
acagcaatgccaatgaaaatc

SEQ ID NO: 40022 - DNA, 21 bp, Artificial Sequence
  source: /note="Description of Artificial Sequence: Synthetic oligonucleotide"
acagcaatgcaaatgacacca

SEQ ID NO: 40023 - DNA, 21 bp, Artificial Sequence
  source: /note="Description of Artificial Sequence: Synthetic oligonucleotide"
acagcaatgcaaacagcaatg

SEQ ID NO: 40024 - DNA, 21 bp, Artificial Sequence
  source: /note="Description of Artificial Sequence: Synthetic oligonucleotide"
acagcaatgacaacaatggga

SEQ ID NO: 40025 - DNA, 21 bp, Artificial Sequence
  source: /note="Description of Artificial Sequence: Synthetic oligonucleotide"
acagcaaacccactcagcaca

SEQ ID NO: 40026 - DNA, 21 bp, Artificial Sequence
  source: /note="Description of Artificial Sequence: Synthetic oligonucleotide"
acagcaaacgtcccagcaaga

SEQ ID NO: 40027 - DNA, 21 bp, Artificial Sequence
  source: /note="Description of Artificial Sequence: Synthetic oligonucleotide"
acagcaaacgtcagaagcatg

SEQ ID NO: 40028 - DNA, 21 bp, Artificial Sequence
  source: /note="Description of Artificial Sequence: Synthetic oligonucleotide"
acagcaccagaaagaacaaac

SEQ ID NO: 40029 - DNA, 21 bp, Artificial Sequence
  source: /note="Description of Artificial Sequence: Synthetic oligonucleotide"
acagcaccaggacacgcaagc

SEQ ID NO: 40030 - DNA, 21 bp, Artificial Sequence
  source: /note="Description of Artificial Sequence: Synthetic oligonucleotide"
acagcaccaccaacagacaga

SEQ ID NO: 40031 - DNA, 21 bp, Artificial Sequence
  source: /note="Description of Artificial Sequence: Synthetic oligonucleotide"
acagcaccaagaagcagcgaa

SEQ ID NO: 40032 - DNA, 21 bp, Artificial Sequence
  source: /note="Description of Artificial Sequence: Synthetic oligonucleotide"
acagcaccaagcagaatggga

SEQ ID NO: 40033 - DNA, 21 bp, Artificial Sequence
  source: /note="Description of Artificial Sequence: Synthetic oligonucleotide"
acagcaccaacaggaacaatc

SEQ ID NO: 40034 - DNA, 21 bp, Artificial Sequence
  source: /note="Description of Artificial Sequence: Synthetic oligonucleotide"
acagcaccatacggagacgca

SEQ ID NO: 40035 - DNA, 21 bp, Artificial Sequence
  source: /note="Description of Artificial Sequence: Synthetic oligonucleotide"
acagcacaagaaggaagaaca

SEQ ID NO: 40036 - DNA, 21 bp, Artificial Sequence
  source: /note="Description of Artificial Sequence: Synthetic oligonucleotide"
acagcacaactcacagcacac

SEQ ID NO: 40037 - DNA, 21 bp, Artificial Sequence
  source: /note="Description of Artificial Sequence: Synthetic oligonucleotide"
acagcacaactcacaagcagc

SEQ ID NO: 40038 - DNA, 21 bp, Artificial Sequence
  source: /note="Description of Artificial Sequence: Synthetic oligonucleotide"
acagcacaaagaggaccagca

SEQ ID NO: 40039 - DNA, 21 bp, Artificial Sequence
  source: /note="Description of Artificial Sequence: Synthetic oligonucleotide"
acagcaagagacagcagccca

SEQ ID NO: 40040 - DNA, 21 bp, Artificial Sequence
  source: /note="Description of Artificial Sequence: Synthetic oligonucleotide"
acagcaagaggactcgtccca

SEQ ID NO: 40041 - DNA, 21 bp, Artificial Sequence
  source: /note="Description of Artificial Sequence: Synthetic oligonucleotide"
acagcaagaggaaacatgctc

SEQ ID NO: 40042 - DNA, 21 bp, Artificial Sequence
  source: /note="Description of Artificial Sequence: Synthetic oligonucleotide"
acagcaagaggaagcccactc

SEQ ID NO: 40043 - DNA, 21 bp, Artificial Sequence
  source: /note="Description of Artificial Sequence: Synthetic oligonucleotide"
acagcaagaccaccaggagtc

SEQ ID NO: 40044 - DNA, 21 bp, Artificial Sequence
  source: /note="Description of Artificial Sequence: Synthetic oligonucleotide"
acagcaagaagcagcgtcaca

SEQ ID NO: 40045 - DNA, 21 bp, Artificial Sequence
  source: /note="Description of Artificial Sequence: Synthetic oligonucleotide"
acagcaagaacactcatcagc

SEQ ID NO: 40046 - DNA, 21 bp, Artificial Sequence
  source: /note="Description of Artificial Sequence: Synthetic oligonucleotide"
acagcaagcgcagcaagaaca

SEQ ID NO: 40047 - DNA, 21 bp, Artificial Sequence
  source: /note="Description of Artificial Sequence: Synthetic oligonucleotide"
acagcaagcgcaacataccca

SEQ ID NO: 40048 - DNA, 21 bp, Artificial Sequence
  source: /note="Description of Artificial Sequence: Synthetic oligonucleotide"
acagcaagcttcagcagcaca

SEQ ID NO: 40049 - DNA, 21 bp, Artificial Sequence
  source: /note="Description of Artificial Sequence: Synthetic oligonucleotide"
acagcaagcggaagcgaaaga

SEQ ID NO: 40050 - DNA, 21 bp, Artificial Sequence
  source: /note="Description of Artificial Sequence: Synthetic oligonucleotide"
acagcaagcaaaaacgactac

SEQ ID NO: 40051 - DNA, 21 bp, Artificial Sequence
  source: /note="Description of Artificial Sequence: Synthetic oligonucleotide"
acagcaagcatgggagaaaga

SEQ ID NO: 40052 - DNA, 21 bp, Artificial Sequence
  source: /note="Description of Artificial Sequence: Synthetic oligonucleotide"
acagcaagcagcatgggaaaa

SEQ ID NO: 40053 - DNA, 21 bp, Artificial Sequence
  source: /note="Description of Artificial Sequence: Synthetic oligonucleotide"
acagcaagcacagtcaaaatg

SEQ ID NO: 40054 - DNA, 21 bp, Artificial Sequence
  source: /note="Description of Artificial Sequence: Synthetic oligonucleotide"
acagcaagcgtcccaatgaaa

SEQ ID NO: 40055 - DNA, 21 bp, Artificial Sequence
  source: /note="Description of Artificial Sequence: Synthetic oligonucleotide"
acagcaagctacagcccaaaa

SEQ ID NO: 40056 - DNA, 21 bp, Artificial Sequence
  source: /note="Description of Artificial Sequence: Synthetic oligonucleotide"
acagcaacaccacacatcgga

SEQ ID NO: 40057 - DNA, 21 bp, Artificial Sequence
  source: /note="Description of Artificial Sequence: Synthetic oligonucleotide"
acagcaacaagaaacgaagtc

SEQ ID NO: 40058 - DNA, 21 bp, Artificial Sequence
  source: /note="Description of Artificial Sequence: Synthetic oligonucleotide"
acagcaacaagaacaggacca

SEQ ID NO: 40059 - DNA, 21 bp, Artificial Sequence
  source: /note="Description of Artificial Sequence: Synthetic oligonucleotide"
acagcaacatacccaaacgac

SEQ ID NO: 40060 - DNA, 21 bp, Artificial Sequence
  source: /note="Description of Artificial Sequence: Synthetic oligonucleotide"
acagcagtcgcacacccagca

SEQ ID NO: 40061 - DNA, 21 bp, Artificial Sequence
  source: /note="Description of Artificial Sequence: Synthetic oligonucleotide"
acagcagtcccagaatggaca

SEQ ID NO: 40062 - DNA, 21 bp, Artificial Sequence
  source: /note="Description of Artificial Sequence: Synthetic oligonucleotide"
acagcagtccaagaacacaca

SEQ ID NO: 40063 - DNA, 21 bp, Artificial Sequence
  source: /note="Description of Artificial Sequence: Synthetic oligonucleotide"
acagcagtcagaagcatcagc

SEQ ID NO: 40064 - DNA, 21 bp, Artificial Sequence
  source: /note="Description of Artificial Sequence: Synthetic oligonucleotide"
acagcagtcgtcaaattccca

SEQ ID NO: 40065 - DNA, 21 bp, Artificial Sequence
  source: /note="Description of Artificial Sequence: Synthetic oligonucleotide"
acagcagtctacgcaacagca

SEQ ID NO: 40066 - DNA, 21 bp, Artificial Sequence
  source: /note="Description of Artificial Sequence: Synthetic oligonucleotide"
acagcagtctacagcaaagga

SEQ ID NO: 40067 - DNA, 21 bp, Artificial Sequence
  source: /note="Description of Artificial Sequence: Synthetic oligonucleotide"
acagcatgggacccagaaagc

SEQ ID NO: 40068 - DNA, 21 bp, Artificial Sequence
  source: /note="Description of Artificial Sequence: Synthetic oligonucleotide"
acagcatactgccaacaatac

SEQ ID NO: 40069 - DNA, 21 bp, Artificial Sequence
  source: /note="Description of Artificial Sequence: Synthetic oligonucleotide"
acagcatacccattcgaagca

SEQ ID NO: 40070 - DNA, 21 bp, Artificial Sequence
  source: /note="Description of Artificial Sequence: Synthetic oligonucleotide"
acagcatacccacaccaaatc

SEQ ID NO: 40071 - DNA, 21 bp, Artificial Sequence
  source: /note="Description of Artificial Sequence: Synthetic oligonucleotide"
acagacgcagacagaagccca

SEQ ID NO: 40072 - DNA, 21 bp, Artificial Sequence
  source: /note="Description of Artificial Sequence: Synthetic oligonucleotide"
acagactgcagacaaggagga

SEQ ID NO: 40073 - DNA, 21 bp, Artificial Sequence
  source: /note="Description of Artificial Sequence: Synthetic oligonucleotide"
acagacgacatcaaaaacgac

SEQ ID NO: 40074 - DNA, 21 bp, Artificial Sequence
  source: /note="Description of Artificial Sequence: Synthetic oligonucleotide"
acagacgaatacaaaaaagca

SEQ ID NO: 40075 - DNA, 21 bp, Artificial Sequence
  source: /note="Description of Artificial Sequence: Synthetic oligonucleotide"
acagacttcagaagaatccca

SEQ ID NO: 40076 - DNA, 21 bp, Artificial Sequence
  source: /note="Description of Artificial Sequence: Synthetic oligonucleotide"
acagacggactccacaaactc

SEQ ID NO: 40077 - DNA, 21 bp, Artificial Sequence
  source: /note="Description of Artificial Sequence: Synthetic oligonucleotide"
acagacggaccaggactcaca

SEQ ID NO: 40078 - DNA, 21 bp, Artificial Sequence
  source: /note="Description of Artificial Sequence: Synthetic oligonucleotide"
acagacggaagactcggagga

SEQ ID NO: 40079 - DNA, 21 bp, Artificial Sequence
  source: /note="Description of Artificial Sequence: Synthetic oligonucleotide"
acagacggaagcagagtccca

SEQ ID NO: 40080 - DNA, 21 bp, Artificial Sequence
  source: /note="Description of Artificial Sequence: Synthetic oligonucleotide"
acagaccacgtccacagagga

SEQ ID NO: 40081 - DNA, 21 bp, Artificial Sequence
  source: /note="Description of Artificial Sequence: Synthetic oligonucleotide"
acagacaaacacggagtcctc

SEQ ID NO: 40082 - DNA, 21 bp, Artificial Sequence
  source: /note="Description of Artificial Sequence: Synthetic oligonucleotide"
acagacaaagtcagaagccaa

SEQ ID NO: 40083 - DNA, 21 bp, Artificial Sequence
  source: /note="Description of Artificial Sequence: Synthetic oligonucleotide"
acagacctccacctcgaactc

SEQ ID NO: 40084 - DNA, 21 bp, Artificial Sequence
  source: /note="Description of Artificial Sequence: Synthetic oligonucleotide"
acagacctcagccacggacac

SEQ ID NO: 40085 - DNA, 21 bp, Artificial Sequence
  source: /note="Description of Artificial Sequence: Synthetic oligonucleotide"
acagacctctacagccaaagc

SEQ ID NO: 40086 - DNA, 21 bp, Artificial Sequence
  source: /note="Description of Artificial Sequence: Synthetic oligonucleotide"
acagacatgcaaagactcgga

SEQ ID NO: 40087 - DNA, 21 bp, Artificial Sequence
  source: /note="Description of Artificial Sequence: Synthetic oligonucleotide"
acagacaacagaatcacagca

SEQ ID NO: 40088 - DNA, 21 bp, Artificial Sequence
  source: /note="Description of Artificial Sequence: Synthetic oligonucleotide"
acagacccacacagcgacaaa

SEQ ID NO: 40089 - DNA, 21 bp, Artificial Sequence
  source: /note="Description of Artificial Sequence: Synthetic oligonucleotide"
acagaccaaagcctcatgagc

SEQ ID NO: 40090 - DNA, 21 bp, Artificial Sequence
  source: /note="Description of Artificial Sequence: Synthetic oligonucleotide"
acagacagaggaggagtccaa

SEQ ID NO: 40091 - DNA, 21 bp, Artificial Sequence
  source: /note="Description of Artificial Sequence: Synthetic oligonucleotide"
acagacagaagcgcactcagc

SEQ ID NO: 40092 - DNA, 21 bp, Artificial Sequence
  source: /note="Description of Artificial Sequence: Synthetic oligonucleotide"
acagacagaagcagcctcagc

SEQ ID NO: 40093 - DNA, 21 bp, Artificial Sequence
  source: /note="Description of Artificial Sequence: Synthetic oligonucleotide"
acagacagagtcccaagcttc

SEQ ID NO: 40094 - DNA, 21 bp, Artificial Sequence
  source: /note="Description of Artificial Sequence: Synthetic oligonucleotide"
acagacagcggaccaacacca

SEQ ID NO: 40095 - DNA, 21 bp, Artificial Sequence
  source: /note="Description of Artificial Sequence: Synthetic oligonucleotide"
acagacagccacgtcctctac

SEQ ID NO: 40096 - DNA, 21 bp, Artificial Sequence
  source: /note="Description of Artificial Sequence: Synthetic oligonucleotide"
acagacacacacagcagcgtc

SEQ ID NO: 40097 - DNA, 21 bp, Artificial Sequence
  source: /note="Description of Artificial Sequence: Synthetic oligonucleotide"
acagacacaagcagaggactc

SEQ ID NO: 40098 - DNA, 21 bp, Artificial Sequence
  source: /note="Description of Artificial Sequence: Synthetic oligonucleotide"
acagacacaacaggaggacca

SEQ ID NO: 40099 - DNA, 21 bp, Artificial Sequence
  source: /note="Description of Artificial Sequence: Synthetic oligonucleotide"
acagacgtcatcacagtcgca

SEQ ID NO: 40100 - DNA, 21 bp, Artificial Sequence
  source: /note="Description of Artificial Sequence: Synthetic oligonucleotide"
acagacgtcccacacccaaac

SEQ ID NO: 40101 - DNA, 21 bp, Artificial Sequence
  source: /note="Description of Artificial Sequence: Synthetic oligonucleotide"
acagacgtcagaccagcagga

SEQ ID NO: 40102 - DNA, 21 bp, Artificial Sequence
  source: /note="Description of Artificial Sequence: Synthetic oligonucleotide"
acagacgtcagaacaaaaaac

SEQ ID NO: 40103 - DNA, 21 bp, Artificial Sequence
  source: /note="Description of Artificial Sequence: Synthetic oligonucleotide"
acagactgggaacacgaccca

SEQ ID NO: 40104 - DNA, 21 bp, Artificial Sequence
  source: /note="Description of Artificial Sequence: Synthetic oligonucleotide"
acagactacgacctcagcagc

SEQ ID NO: 40105 - DNA, 21 bp, Artificial Sequence
  source: /note="Description of Artificial Sequence: Synthetic oligonucleotide"
acagaagcagcaagcagacaa

SEQ ID NO: 40106 - DNA, 21 bp, Artificial Sequence
  source: /note="Description of Artificial Sequence: Synthetic oligonucleotide"
acagaagcaagaaacccagtc

SEQ ID NO: 40107 - DNA, 21 bp, Artificial Sequence
  source: /note="Description of Artificial Sequence: Synthetic oligonucleotide"
acagaagacacagcaccatgc

SEQ ID NO: 40108 - DNA, 21 bp, Artificial Sequence
  source: /note="Description of Artificial Sequence: Synthetic oligonucleotide"
acagaattctacgacctcgaa

SEQ ID NO: 40109 - DNA, 21 bp, Artificial Sequence
  source: /note="Description of Artificial Sequence: Synthetic oligonucleotide"
acagaaggaagagcaccaaca

SEQ ID NO: 40110 - DNA, 21 bp, Artificial Sequence
  source: /note="Description of Artificial Sequence: Synthetic oligonucleotide"
acagaacacggaacaaaaatc

SEQ ID NO: 40111 - DNA, 21 bp, Artificial Sequence
  source: /note="Description of Artificial Sequence: Synthetic oligonucleotide"
acagaactcaacagagcaatc

SEQ ID NO: 40112 - DNA, 21 bp, Artificial Sequence
  source: /note="Description of Artificial Sequence: Synthetic oligonucleotide"
acagaactcagccacaacaga

SEQ ID NO: 40113 - DNA, 21 bp, Artificial Sequence
  source: /note="Description of Artificial Sequence: Synthetic oligonucleotide"
acagaactcagcagcccaaga

SEQ ID NO: 40114 - DNA, 21 bp, Artificial Sequence
  source: /note="Description of Artificial Sequence: Synthetic oligonucleotide"
acagaactcgtcatcggaaaa

SEQ ID NO: 40115 - DNA, 21 bp, Artificial Sequence
  source: /note="Description of Artificial Sequence: Synthetic oligonucleotide"
acagaaaacgcaggaacagga

SEQ ID NO: 40116 - DNA, 21 bp, Artificial Sequence
  source: /note="Description of Artificial Sequence: Synthetic oligonucleotide"
acagaaccaccacacgtcgca

SEQ ID NO: 40117 - DNA, 21 bp, Artificial Sequence
  source: /note="Description of Artificial Sequence: Synthetic oligonucleotide"
acagaaccaccatacagactc

SEQ ID NO: 40118 - DNA, 21 bp, Artificial Sequence
  source: /note="Description of Artificial Sequence: Synthetic oligonucleotide"
acagaaccacaaatcggaaga

SEQ ID NO: 40119 - DNA, 21 bp, Artificial Sequence
  source: /note="Description of Artificial Sequence: Synthetic oligonucleotide"
acagaaccaagaatggtcagc

SEQ ID NO: 40120 - DNA, 21 bp, Artificial Sequence
  source: /note="Description of Artificial Sequence: Synthetic oligonucleotide"
acagaaccatacgcaccagac

SEQ ID NO: 40121 - DNA, 21 bp, Artificial Sequence
  source: /note="Description of Artificial Sequence: Synthetic oligonucleotide"
acagaaccatacacagacttc

SEQ ID NO: 40122 - DNA, 21 bp, Artificial Sequence
  source: /note="Description of Artificial Sequence: Synthetic oligonucleotide"
acagaaagagcagacgaacac

SEQ ID NO: 40123 - DNA, 21 bp, Artificial Sequence
  source: /note="Description of Artificial Sequence: Synthetic oligonucleotide"
acagaaagaccaagcccaaca

SEQ ID NO: 40124 - DNA, 21 bp, Artificial Sequence
  source: /note="Description of Artificial Sequence: Synthetic oligonucleotide"
acagaaagccaccacccactc

SEQ ID NO: 40125 - DNA, 21 bp, Artificial Sequence
  source: /note="Description of Artificial Sequence: Synthetic oligonucleotide"
acagaaagcacattcaacatg

SEQ ID NO: 40126 - DNA, 21 bp, Artificial Sequence
  source: /note="Description of Artificial Sequence: Synthetic oligonucleotide"
acagaaagcacacaccaaaca

SEQ ID NO: 40127 - DNA, 21 bp, Artificial Sequence
  source: /note="Description of Artificial Sequence: Synthetic oligonucleotide"
acagaaacagcaagcagccca

SEQ ID NO: 40128 - DNA, 21 bp, Artificial Sequence
  source: /note="Description of Artificial Sequence: Synthetic oligonucleotide"
acagaaacaggaaactgccac

SEQ ID NO: 40129 - DNA, 21 bp, Artificial Sequence
  source: /note="Description of Artificial Sequence: Synthetic oligonucleotide"
acagaaacactccacaacaga

SEQ ID NO: 40130 - DNA, 21 bp, Artificial Sequence
  source: /note="Description of Artificial Sequence: Synthetic oligonucleotide"
acagaaacagtcggagacctc

SEQ ID NO: 40131 - DNA, 21 bp, Artificial Sequence
  source: /note="Description of Artificial Sequence: Synthetic oligonucleotide"
acagaagtcaaactcctccca

SEQ ID NO: 40132 - DNA, 21 bp, Artificial Sequence
  source: /note="Description of Artificial Sequence: Synthetic oligonucleotide"
acagaagtcagaccaggactc

SEQ ID NO: 40133 - DNA, 21 bp, Artificial Sequence
  source: /note="Description of Artificial Sequence: Synthetic oligonucleotide"
acagaagtcagaagcccactc

SEQ ID NO: 40134 - DNA, 21 bp, Artificial Sequence
  source: /note="Description of Artificial Sequence: Synthetic oligonucleotide"
acagaagtcagcagcaacaaa

SEQ ID NO: 40135 - DNA, 21 bp, Artificial Sequence
  source: /note="Description of Artificial Sequence: Synthetic oligonucleotide"
acagaatggagcagcaacgac

SEQ ID NO: 40136 - DNA, 21 bp, Artificial Sequence
  source: /note="Description of Artificial Sequence: Synthetic oligonucleotide"
acagaatacgcaacaagacca

SEQ ID NO: 40137 - DNA, 21 bp, Artificial Sequence
  source: /note="Description of Artificial Sequence: Synthetic oligonucleotide"
acagaatacacactccacgga

SEQ ID NO: 40138 - DNA, 21 bp, Artificial Sequence
  source: /note="Description of Artificial Sequence: Synthetic oligonucleotide"
acattcgcaagcggagcacca

SEQ ID NO: 40139 - DNA, 21 bp, Artificial Sequence
  source: /note="Description of Artificial Sequence: Synthetic oligonucleotide"
acattcgcaagcccactcctc

SEQ ID NO: 40140 - DNA, 21 bp, Artificial Sequence
  source: /note="Description of Artificial Sequence: Synthetic oligonucleotide"
acattcgacccacaatgggca

SEQ ID NO: 40141 - DNA, 21 bp, Artificial Sequence
  source: /note="Description of Artificial Sequence: Synthetic oligonucleotide"
acattcgacacaagaggaagc

SEQ ID NO: 40142 - DNA, 21 bp, Artificial Sequence
  source: /note="Description of Artificial Sequence: Synthetic oligonucleotide"
acattcggagcaatcagcgca

SEQ ID NO: 40143 - DNA, 21 bp, Artificial Sequence
  source: /note="Description of Artificial Sequence: Synthetic oligonucleotide"
acattcggaagcgacggaaca

SEQ ID NO: 40144 - DNA, 21 bp, Artificial Sequence
  source: /note="Description of Artificial Sequence: Synthetic oligonucleotide"
acattcggaacaagcatcaaa

SEQ ID NO: 40145 - DNA, 21 bp, Artificial Sequence
  source: /note="Description of Artificial Sequence: Synthetic oligonucleotide"
acattccacgcaccaagcagc

SEQ ID NO: 40146 - DNA, 21 bp, Artificial Sequence
  source: /note="Description of Artificial Sequence: Synthetic oligonucleotide"
acattccacagaacagacaac

SEQ ID NO: 40147 - DNA, 21 bp, Artificial Sequence
  source: /note="Description of Artificial Sequence: Synthetic oligonucleotide"
acattcaaagacccaacagtc

SEQ ID NO: 40148 - DNA, 21 bp, Artificial Sequence
  source: /note="Description of Artificial Sequence: Synthetic oligonucleotide"
acattcaaaatcacaggagac

SEQ ID NO: 40149 - DNA, 21 bp, Artificial Sequence
  source: /note="Description of Artificial Sequence: Synthetic oligonucleotide"
acattcaacggaatgaacgaa

SEQ ID NO: 40150 - DNA, 21 bp, Artificial Sequence
  source: /note="Description of Artificial Sequence: Synthetic oligonucleotide"
acattcccactcccaagaaca

SEQ ID NO: 40151 - DNA, 21 bp, Artificial Sequence
  source: /note="Description of Artificial Sequence: Synthetic oligonucleotide"
acattcccactcagcgactgg

SEQ ID NO: 40152 - DNA, 21 bp, Artificial Sequence
  source: /note="Description of Artificial Sequence: Synthetic oligonucleotide"
acattcccaacaagcggaatg

SEQ ID NO: 40153 - DNA, 21 bp, Artificial Sequence
  source: /note="Description of Artificial Sequence: Synthetic oligonucleotide"
acattccaaccaacaagcgtc

SEQ ID NO: 40154 - DNA, 21 bp, Artificial Sequence
  source: /note="Description of Artificial Sequence: Synthetic oligonucleotide"
acattcagaggaatgaaagac

SEQ ID NO: 40155 - DNA, 21 bp, Artificial Sequence
  source: /note="Description of Artificial Sequence: Synthetic oligonucleotide"
acattcagaacaagcgtcgca

SEQ ID NO: 40156 - DNA, 21 bp, Artificial Sequence
  source: /note="Description of Artificial Sequence: Synthetic oligonucleotide"
acattcagcatcgtcagccca

SEQ ID NO: 40157 - DNA, 21 bp, Artificial Sequence
  source: /note="Description of Artificial Sequence: Synthetic oligonucleotide"
acattcagcccaccaaacttc

SEQ ID NO: 40158 - DNA, 21 bp, Artificial Sequence
  source: /note="Description of Artificial Sequence: Synthetic oligonucleotide"
acattcagcccaacattcagc

SEQ ID NO: 40159 - DNA, 21 bp, Artificial Sequence
  source: /note="Description of Artificial Sequence: Synthetic oligonucleotide"
acattcagcagcacaagccac

SEQ ID NO: 40160 - DNA, 21 bp, Artificial Sequence
  source: /note="Description of Artificial Sequence: Synthetic oligonucleotide"
acattcagcagcgtcgcagca

SEQ ID NO: 40161 - DNA, 21 bp, Artificial Sequence
  source: /note="Description of Artificial Sequence: Synthetic oligonucleotide"
acattcagcagcgtcacagga

SEQ ID NO: 40162 - DNA, 21 bp, Artificial Sequence
  source: /note="Description of Artificial Sequence: Synthetic oligonucleotide"
acattcagcacaggaagagtc

SEQ ID NO: 40163 - DNA, 21 bp, Artificial Sequence
  source: /note="Description of Artificial Sequence: Synthetic oligonucleotide"
acattcagcacaggaagccca

SEQ ID NO: 40164 - DNA, 21 bp, Artificial Sequence
  source: /note="Description of Artificial Sequence: Synthetic oligonucleotide"
acattcagcacaaacacaagc

SEQ ID NO: 40165 - DNA, 21 bp, Artificial Sequence
  source: /note="Description of Artificial Sequence: Synthetic oligonucleotide"
acattcagcgtcagccaaatc

SEQ ID NO: 40166 - DNA, 21 bp, Artificial Sequence
  source: /note="Description of Artificial Sequence: Synthetic oligonucleotide"
acattcacaaacccaacaaac

SEQ ID NO: 40167 - DNA, 21 bp, Artificial Sequence
  source: /note="Description of Artificial Sequence: Synthetic oligonucleotide"
acattcacacaactcgcaagc

SEQ ID NO: 40168 - DNA, 21 bp, Artificial Sequence
  source: /note="Description of Artificial Sequence: Synthetic oligonucleotide"
acattcgtcagagaagtcgtc

SEQ ID NO: 40169 - DNA, 21 bp, Artificial Sequence
  source: /note="Description of Artificial Sequence: Synthetic oligonucleotide"
acattcgtcagcggaggagac

SEQ ID NO: 40170 - DNA, 21 bp, Artificial Sequence
  source: /note="Description of Artificial Sequence: Synthetic oligonucleotide"
acaggagcaggacaaacactc

SEQ ID NO: 40171 - DNA, 21 bp, Artificial Sequence
  source: /note="Description of Artificial Sequence: Synthetic oligonucleotide"
acaggagcacacgtcggagaa

SEQ ID NO: 40172 - DNA, 21 bp, Artificial Sequence
  source: /note="Description of Artificial Sequence: Synthetic oligonucleotide"
acaggagcactcgcaacactc

SEQ ID NO: 40173 - DNA, 21 bp, Artificial Sequence
  source: /note="Description of Artificial Sequence: Synthetic oligonucleotide"
acaggagcaccaccacaaatc

SEQ ID NO: 40174 - DNA, 21 bp, Artificial Sequence
  source: /note="Description of Artificial Sequence: Synthetic oligonucleotide"
acaggagcaagcgtcctcttc

SEQ ID NO: 40175 - DNA, 21 bp, Artificial Sequence
  source: /note="Description of Artificial Sequence: Synthetic oligonucleotide"
acaggagcagtcttcacacca

SEQ ID NO: 40176 - DNA, 21 bp, Artificial Sequence
  source: /note="Description of Artificial Sequence: Synthetic oligonucleotide"
acaggagacgcaacaccattc

SEQ ID NO: 40177 - DNA, 21 bp, Artificial Sequence
  source: /note="Description of Artificial Sequence: Synthetic oligonucleotide"
acaggagaccaaaaatggcac

SEQ ID NO: 40178 - DNA, 21 bp, Artificial Sequence
  source: /note="Description of Artificial Sequence: Synthetic oligonucleotide"
acaggagaccaaaacagatac

SEQ ID NO: 40179 - DNA, 21 bp, Artificial Sequence
  source: /note="Description of Artificial Sequence: Synthetic oligonucleotide"
acaggagacacaagcagaaca

SEQ ID NO: 40180 - DNA, 21 bp, Artificial Sequence
  source: /note="Description of Artificial Sequence: Synthetic oligonucleotide"
acaggagacgtcgacggatgg

SEQ ID NO: 40181 - DNA, 21 bp, Artificial Sequence
  source: /note="Description of Artificial Sequence: Synthetic oligonucleotide"
acaggagaacaaccaggacac

SEQ ID NO: 40182 - DNA, 21 bp, Artificial Sequence
  source: /note="Description of Artificial Sequence: Synthetic oligonucleotide"
acaggattcagcgaccaattc

SEQ ID NO: 40183 - DNA, 21 bp, Artificial Sequence
  source: /note="Description of Artificial Sequence: Synthetic oligonucleotide"
acaggaggagcacaaagagga

SEQ ID NO: 40184 - DNA, 21 bp, Artificial Sequence
  source: /note="Description of Artificial Sequence: Synthetic oligonucleotide"
acaggaggaagcccaacaagc

SEQ ID NO: 40185 - DNA, 21 bp, Artificial Sequence
  source: /note="Description of Artificial Sequence: Synthetic oligonucleotide"
acaggaggaagcacaagactc

SEQ ID NO: 40186 - DNA, 21 bp, Artificial Sequence
  source: /note="Description of Artificial Sequence: Synthetic oligonucleotide"
acaggaggatacgtcctcgca

SEQ ID NO: 40187 - DNA, 21 bp, Artificial Sequence
  source: /note="Description of Artificial Sequence: Synthetic oligonucleotide"
acaggacacgcacaaaaccaa

SEQ ID NO: 40188 - DNA, 21 bp, Artificial Sequence
  source: /note="Description of Artificial Sequence: Synthetic oligonucleotide"
acaggacacgacacagtcgaa

SEQ ID NO: 40189 - DNA, 21 bp, Artificial Sequence
  source: /note="Description of Artificial Sequence: Synthetic oligonucleotide"
acaggacacacaagactcgac

SEQ ID NO: 40190 - DNA, 21 bp, Artificial Sequence
  source: /note="Description of Artificial Sequence: Synthetic oligonucleotide"
acaggacacacaagcacactc

SEQ ID NO: 40191 - DNA, 21 bp, Artificial Sequence
  source: /note="Description of Artificial Sequence: Synthetic oligonucleotide"
acaggaatcgcaccaaacagc

SEQ ID NO: 40192 - DNA, 21 bp, Artificial Sequence
  source: /note="Description of Artificial Sequence: Synthetic oligonucleotide"
acaggaatcagcagccacatg

SEQ ID NO: 40193 - DNA, 21 bp, Artificial Sequence
  source: /note="Description of Artificial Sequence: Synthetic oligonucleotide"
acaggaatcacaggagcacca

SEQ ID NO: 40194 - DNA, 21 bp, Artificial Sequence
  source: /note="Description of Artificial Sequence: Synthetic oligonucleotide"
acaggaaaagtcctcggattc

SEQ ID NO: 40195 - DNA, 21 bp, Artificial Sequence
  source: /note="Description of Artificial Sequence: Synthetic oligonucleotide"
acaggactctgcccacaccca

SEQ ID NO: 40196 - DNA, 21 bp, Artificial Sequence
  source: /note="Description of Artificial Sequence: Synthetic oligonucleotide"
acaggactcggactcctcaca

SEQ ID NO: 40197 - DNA, 21 bp, Artificial Sequence
  source: /note="Description of Artificial Sequence: Synthetic oligonucleotide"
acaggactcatgggaccagtc

SEQ ID NO: 40198 - DNA, 21 bp, Artificial Sequence
  source: /note="Description of Artificial Sequence: Synthetic oligonucleotide"
acaggactcaaccacttcaac

SEQ ID NO: 40199 - DNA, 21 bp, Artificial Sequence
  source: /note="Description of Artificial Sequence: Synthetic oligonucleotide"
acaggactcaacccagcactc

SEQ ID NO: 40200 - DNA, 21 bp, Artificial Sequence
  source: /note="Description of Artificial Sequence: Synthetic oligonucleotide"
acaggactcccagtcggattc

SEQ ID NO: 40201 - DNA, 21 bp, Artificial Sequence
  source: /note="Description of Artificial Sequence: Synthetic oligonucleotide"
acaggactcagaggaacagtc

SEQ ID NO: 40202 - DNA, 21 bp, Artificial Sequence
  source: /note="Description of Artificial Sequence: Synthetic oligonucleotide"
acaggactcgtcacagacgaa

SEQ ID NO: 40203 - DNA, 21 bp, Artificial Sequence
  source: /note="Description of Artificial Sequence: Synthetic oligonucleotide"
acaggaatgaacaacttcagc

SEQ ID NO: 40204 - DNA, 21 bp, Artificial Sequence
  source: /note="Description of Artificial Sequence: Synthetic oligonucleotide"
acaggaatgcaagcagcactc

SEQ ID NO: 40205 - DNA, 21 bp, Artificial Sequence
  source: /note="Description of Artificial Sequence: Synthetic oligonucleotide"
acaggaaaccacatcagaatc

SEQ ID NO: 40206 - DNA, 21 bp, Artificial Sequence
  source: /note="Description of Artificial Sequence: Synthetic oligonucleotide"
acaggaaaccacgtcacattc

SEQ ID NO: 40207 - DNA, 21 bp, Artificial Sequence
  source: /note="Description of Artificial Sequence: Synthetic oligonucleotide"
acaggaaacatcagcccactc

SEQ ID NO: 40208 - DNA, 21 bp, Artificial Sequence
  source: /note="Description of Artificial Sequence: Synthetic oligonucleotide"
acaggaaacagcccacacgca

SEQ ID NO: 40209 - DNA, 21 bp, Artificial Sequence
  source: /note="Description of Artificial Sequence: Synthetic oligonucleotide"
acaggaccagcaccactcgac

SEQ ID NO: 40210 - DNA, 21 bp, Artificial Sequence
  source: /note="Description of Artificial Sequence: Synthetic oligonucleotide"
acaggaccagcaagaggaagc

SEQ ID NO: 40211 - DNA, 21 bp, Artificial Sequence
  source: /note="Description of Artificial Sequence: Synthetic oligonucleotide"
acaggaccagactacccaaaa

SEQ ID NO: 40212 - DNA, 21 bp, Artificial Sequence
  source: /note="Description of Artificial Sequence: Synthetic oligonucleotide"
acaggaccacacctcaaagca

SEQ ID NO: 40213 - DNA, 21 bp, Artificial Sequence
  source: /note="Description of Artificial Sequence: Synthetic oligonucleotide"
acaggaccaatcaacgcacca

SEQ ID NO: 40214 - DNA, 21 bp, Artificial Sequence
  source: /note="Description of Artificial Sequence: Synthetic oligonucleotide"
acaggaccaaacacaagcaca

SEQ ID NO: 40215 - DNA, 21 bp, Artificial Sequence
  source: /note="Description of Artificial Sequence: Synthetic oligonucleotide"
acaggaccaccaacaacaatg

SEQ ID NO: 40216 - DNA, 21 bp, Artificial Sequence
  source: /note="Description of Artificial Sequence: Synthetic oligonucleotide"
acaggaccaagactcagcaca

SEQ ID NO: 40217 - DNA, 21 bp, Artificial Sequence
  source: /note="Description of Artificial Sequence: Synthetic oligonucleotide"
acaggaccaagcgcaagagca

SEQ ID NO: 40218 - DNA, 21 bp, Artificial Sequence
  source: /note="Description of Artificial Sequence: Synthetic oligonucleotide"
acaggaccaagcatccacaca

SEQ ID NO: 40219 - DNA, 21 bp, Artificial Sequence
  source: /note="Description of Artificial Sequence: Synthetic oligonucleotide"
acaggaccaagcctcgacaga

SEQ ID NO: 40220 - DNA, 21 bp, Artificial Sequence
  source: /note="Description of Artificial Sequence: Synthetic oligonucleotide"
acaggaccaagcagaacaagc

SEQ ID NO: 40221 - DNA, 21 bp, Artificial Sequence
  source: /note="Description of Artificial Sequence: Synthetic oligonucleotide"
acaggacaaggaaacgcagac

SEQ ID NO: 40222 - DNA, 21 bp, Artificial Sequence
  source: /note="Description of Artificial Sequence: Synthetic oligonucleotide"
acaggacaaagagcaggacaa

SEQ ID NO: 40223 - DNA, 21 bp, Artificial Sequence
  source: /note="Description of Artificial Sequence: Synthetic oligonucleotide"
acaggacaaagaatggacctc

SEQ ID NO: 40224 - DNA, 21 bp, Artificial Sequence
  source: /note="Description of Artificial Sequence: Synthetic oligonucleotide"
acaggacaaagacaaaacgtc

SEQ ID NO: 40225 - DNA, 21 bp, Artificial Sequence
  source: /note="Description of Artificial Sequence: Synthetic oligonucleotide"
acaggaagaccagtcggaaac

SEQ ID NO: 40226 - DNA, 21 bp, Artificial Sequence
  source: /note="Description of Artificial Sequence: Synthetic oligonucleotide"
acaggaagagtcgcaggaagc

SEQ ID NO: 40227 - DNA, 21 bp, Artificial Sequence
  source: /note="Description of Artificial Sequence: Synthetic oligonucleotide"
acaggaagcgcaggagaaaaa

SEQ ID NO: 40228 - DNA, 21 bp, Artificial Sequence
  source: /note="Description of Artificial Sequence: Synthetic oligonucleotide"
acaggaagcgcacacgtcagc

SEQ ID NO: 40229 - DNA, 21 bp, Artificial Sequence
  source: /note="Description of Artificial Sequence: Synthetic oligonucleotide"
acaggaagcgcaatgagacca

SEQ ID NO: 40230 - DNA, 21 bp, Artificial Sequence
  source: /note="Description of Artificial Sequence: Synthetic oligonucleotide"
acaggaagcggacacggacca

SEQ ID NO: 40231 - DNA, 21 bp, Artificial Sequence
  source: /note="Description of Artificial Sequence: Synthetic oligonucleotide"
acaggaagcaaaccaggaagc

SEQ ID NO: 40232 - DNA, 21 bp, Artificial Sequence
  source: /note="Description of Artificial Sequence: Synthetic oligonucleotide"
acaggaagcctccaatacgac

SEQ ID NO: 40233 - DNA, 21 bp, Artificial Sequence
  source: /note="Description of Artificial Sequence: Synthetic oligonucleotide"
acaggaagcagcggattcctc

SEQ ID NO: 40234 - DNA, 21 bp, Artificial Sequence
  source: /note="Description of Artificial Sequence: Synthetic oligonucleotide"
acaggaagcagcgtcagagca

SEQ ID NO: 40235 - DNA, 21 bp, Artificial Sequence
  source: /note="Description of Artificial Sequence: Synthetic oligonucleotide"
acaggaacaggaagaatccac

SEQ ID NO: 40236 - DNA, 21 bp, Artificial Sequence
  source: /note="Description of Artificial Sequence: Synthetic oligonucleotide"
acaggaacaagcagctgggtc

SEQ ID NO: 40237 - DNA, 21 bp, Artificial Sequence
  source: /note="Description of Artificial Sequence: Synthetic oligonucleotide"
acaggaacaacactccaccca

SEQ ID NO: 40238 - DNA, 21 bp, Artificial Sequence
  source: /note="Description of Artificial Sequence: Synthetic oligonucleotide"
acaggagtcccaagaggattc

SEQ ID NO: 40239 - DNA, 21 bp, Artificial Sequence
  source: /note="Description of Artificial Sequence: Synthetic oligonucleotide"
acaggagtcccaagaccatac

SEQ ID NO: 40240 - DNA, 21 bp, Artificial Sequence
  source: /note="Description of Artificial Sequence: Synthetic oligonucleotide"
acaggagtcccagtcgacgca

SEQ ID NO: 40241 - DNA, 21 bp, Artificial Sequence
  source: /note="Description of Artificial Sequence: Synthetic oligonucleotide"
acaggatacgaattcaaactc

SEQ ID NO: 40242 - DNA, 21 bp, Artificial Sequence
  source: /note="Description of Artificial Sequence: Synthetic oligonucleotide"
acaggatacaaaagcccaaac

SEQ ID NO: 40243 - DNA, 21 bp, Artificial Sequence
  source: /note="Description of Artificial Sequence: Synthetic oligonucleotide"
acacacgcagcagcagacttc

SEQ ID NO: 40244 - DNA, 21 bp, Artificial Sequence
  source: /note="Description of Artificial Sequence: Synthetic oligonucleotide"
acacacgcaatcatcgtcaca

SEQ ID NO: 40245 - DNA, 21 bp, Artificial Sequence
  source: /note="Description of Artificial Sequence: Synthetic oligonucleotide"
acacacgcacaaacaagcgtc

SEQ ID NO: 40246 - DNA, 21 bp, Artificial Sequence
  source: /note="Description of Artificial Sequence: Synthetic oligonucleotide"
acacacgacgaagacagaaga

SEQ ID NO: 40247 - DNA, 21 bp, Artificial Sequence
  source: /note="Description of Artificial Sequence: Synthetic oligonucleotide"
acacacgaccacgcagacagc

SEQ ID NO: 40248 - DNA, 21 bp, Artificial Sequence
  source: /note="Description of Artificial Sequence: Synthetic oligonucleotide"
acacacgacctcagcctcgca

SEQ ID NO: 40249 - DNA, 21 bp, Artificial Sequence
  source: /note="Description of Artificial Sequence: Synthetic oligonucleotide"
acacacgacccaagacacgga

SEQ ID NO: 40250 - DNA, 21 bp, Artificial Sequence
  source: /note="Description of Artificial Sequence: Synthetic oligonucleotide"
acacacgaacactacagccac

SEQ ID NO: 40251 - DNA, 21 bp, Artificial Sequence
  source: /note="Description of Artificial Sequence: Synthetic oligonucleotide"
acacacgaaccaagaagagca

SEQ ID NO: 40252 - DNA, 21 bp, Artificial Sequence
  source: /note="Description of Artificial Sequence: Synthetic oligonucleotide"
acacacgaaagcgcagcagca

SEQ ID NO: 40253 - DNA, 21 bp, Artificial Sequence
  source: /note="Description of Artificial Sequence: Synthetic oligonucleotide"
acacacttcccaggactccca

SEQ ID NO: 40254 - DNA, 21 bp, Artificial Sequence
  source: /note="Description of Artificial Sequence: Synthetic oligonucleotide"
acacacggaagactcccaaac

SEQ ID NO: 40255 - DNA, 21 bp, Artificial Sequence
  source: /note="Description of Artificial Sequence: Synthetic oligonucleotide"
acacaccacgcagcactcaca

SEQ ID NO: 40256 - DNA, 21 bp, Artificial Sequence
  source: /note="Description of Artificial Sequence: Synthetic oligonucleotide"
acacaccacagcggaagcatc

SEQ ID NO: 40257 - DNA, 21 bp, Artificial Sequence
  source: /note="Description of Artificial Sequence: Synthetic oligonucleotide"
acacaccacgtcacacaaaca

SEQ ID NO: 40258 - DNA, 21 bp, Artificial Sequence
  source: /note="Description of Artificial Sequence: Synthetic oligonucleotide"
acacacatcccaagcagacca

SEQ ID NO: 40259 - DNA, 21 bp, Artificial Sequence
  source: /note="Description of Artificial Sequence: Synthetic oligonucleotide"
acacacatcagaagcgcacaa

SEQ ID NO: 40260 - DNA, 21 bp, Artificial Sequence
  source: /note="Description of Artificial Sequence: Synthetic oligonucleotide"
acacacaaagaaacacacatg

SEQ ID NO: 40261 - DNA, 21 bp, Artificial Sequence
  source: /note="Description of Artificial Sequence: Synthetic oligonucleotide"
acacacaaattcccaacaagc

SEQ ID NO: 40262 - DNA, 21 bp, Artificial Sequence
  source: /note="Description of Artificial Sequence: Synthetic oligonucleotide"
acacacaaactcacagcagaa

SEQ ID NO: 40263 - DNA, 21 bp, Artificial Sequence
  source: /note="Description of Artificial Sequence: Synthetic oligonucleotide"
acacacaaaagcatcagcaac

SEQ ID NO: 40264 - DNA, 21 bp, Artificial Sequence
  source: /note="Description of Artificial Sequence: Synthetic oligonucleotide"
acacacctcgcaagcagcgac

SEQ ID NO: 40265 - DNA, 21 bp, Artificial Sequence
  source: /note="Description of Artificial Sequence: Synthetic oligonucleotide"
acacacctcggagaaagcgtc

SEQ ID NO: 40266 - DNA, 21 bp, Artificial Sequence
  source: /note="Description of Artificial Sequence: Synthetic oligonucleotide"
acacacctcagcaacacactc

SEQ ID NO: 40267 - DNA, 21 bp, Artificial Sequence
  source: /note="Description of Artificial Sequence: Synthetic oligonucleotide"
acacacctcagcacagcaaaa

SEQ ID NO: 40268 - DNA, 21 bp, Artificial Sequence
  source: /note="Description of Artificial Sequence: Synthetic oligonucleotide"
acacacctcagcacaccaagc

SEQ ID NO: 40269 - DNA, 21 bp, Artificial Sequence
  source: /note="Description of Artificial Sequence: Synthetic oligonucleotide"
acacacatgatcggaaacaca

SEQ ID NO: 40270 - DNA, 21 bp, Artificial Sequence
  source: /note="Description of Artificial Sequence: Synthetic oligonucleotide"
acacacaacgcactcacagtc

SEQ ID NO: 40271 - DNA, 21 bp, Artificial Sequence
  source: /note="Description of Artificial Sequence: Synthetic oligonucleotide"
acacacaacctcagcatcaga

SEQ ID NO: 40272 - DNA, 21 bp, Artificial Sequence
  source: /note="Description of Artificial Sequence: Synthetic oligonucleotide"
acacacccagcagtcacacaa

SEQ ID NO: 40273 - DNA, 21 bp, Artificial Sequence
  source: /note="Description of Artificial Sequence: Synthetic oligonucleotide"
acacacccagacagaggactc

SEQ ID NO: 40274 - DNA, 21 bp, Artificial Sequence
  source: /note="Description of Artificial Sequence: Synthetic oligonucleotide"
acacacccaaaaccaacactc

SEQ ID NO: 40275 - DNA, 21 bp, Artificial Sequence
  source: /note="Description of Artificial Sequence: Synthetic oligonucleotide"
acacacccacaaagcgtcgac

SEQ ID NO: 40276 - DNA, 21 bp, Artificial Sequence
  source: /note="Description of Artificial Sequence: Synthetic oligonucleotide"
acacacccaagcgtcccagtc

SEQ ID NO: 40277 - DNA, 21 bp, Artificial Sequence
  source: /note="Description of Artificial Sequence: Synthetic oligonucleotide"
acacacccagtcggaatcctc

SEQ ID NO: 40278 - DNA, 21 bp, Artificial Sequence
  source: /note="Description of Artificial Sequence: Synthetic oligonucleotide"
acacacccagtcagcagcgtc

SEQ ID NO: 40279 - DNA, 21 bp, Artificial Sequence
  source: /note="Description of Artificial Sequence: Synthetic oligonucleotide"
acacaccaaacaagcgtctac

SEQ ID NO: 40280 - DNA, 21 bp, Artificial Sequence
  source: /note="Description of Artificial Sequence: Synthetic oligonucleotide"
acacaccaagtcccaagcgtc

SEQ ID NO: 40281 - DNA, 21 bp, Artificial Sequence
  source: /note="Description of Artificial Sequence: Synthetic oligonucleotide"
acacacagagacggaatcatg

SEQ ID NO: 40282 - DNA, 21 bp, Artificial Sequence
  source: /note="Description of Artificial Sequence: Synthetic oligonucleotide"
acacacagacaagacacaagc

SEQ ID NO: 40283 - DNA, 21 bp, Artificial Sequence
  source: /note="Description of Artificial Sequence: Synthetic oligonucleotide"
acacacagaagcctcgacgtc

SEQ ID NO: 40284 - DNA, 21 bp, Artificial Sequence
  source: /note="Description of Artificial Sequence: Synthetic oligonucleotide"
acacacagaagccaaacagtc

SEQ ID NO: 40285 - DNA, 21 bp, Artificial Sequence
  source: /note="Description of Artificial Sequence: Synthetic oligonucleotide"
acacacagcgcatacaaccac

SEQ ID NO: 40286 - DNA, 21 bp, Artificial Sequence
  source: /note="Description of Artificial Sequence: Synthetic oligonucleotide"
acacacagcgaaagcagcaaa

SEQ ID NO: 40287 - DNA, 21 bp, Artificial Sequence
  source: /note="Description of Artificial Sequence: Synthetic oligonucleotide"
acacacagcggagcaaacaac

SEQ ID NO: 40288 - DNA, 21 bp, Artificial Sequence
  source: /note="Description of Artificial Sequence: Synthetic oligonucleotide"
acacacagccacgtcgacgac

SEQ ID NO: 40289 - DNA, 21 bp, Artificial Sequence
  source: /note="Description of Artificial Sequence: Synthetic oligonucleotide"
acacacagcatggtcatgcca

SEQ ID NO: 40290 - DNA, 21 bp, Artificial Sequence
  source: /note="Description of Artificial Sequence: Synthetic oligonucleotide"
acacacagcccactcacaaga

SEQ ID NO: 40291 - DNA, 21 bp, Artificial Sequence
  source: /note="Description of Artificial Sequence: Synthetic oligonucleotide"
acacacacactcaacacaaga

SEQ ID NO: 40292 - DNA, 21 bp, Artificial Sequence
  source: /note="Description of Artificial Sequence: Synthetic oligonucleotide"
acacacacaccactcccagca

SEQ ID NO: 40293 - DNA, 21 bp, Artificial Sequence
  source: /note="Description of Artificial Sequence: Synthetic oligonucleotide"
acacacacaagaacactcatg

SEQ ID NO: 40294 - DNA, 21 bp, Artificial Sequence
  source: /note="Description of Artificial Sequence: Synthetic oligonucleotide"
acacacacaagcgcagcagaa

SEQ ID NO: 40295 - DNA, 21 bp, Artificial Sequence
  source: /note="Description of Artificial Sequence: Synthetic oligonucleotide"
acacacacagtcggaacacaa

SEQ ID NO: 40296 - DNA, 21 bp, Artificial Sequence
  source: /note="Description of Artificial Sequence: Synthetic oligonucleotide"
acacacgtcgcagaagtcaca

SEQ ID NO: 40297 - DNA, 21 bp, Artificial Sequence
  source: /note="Description of Artificial Sequence: Synthetic oligonucleotide"
acacacgtcccaccaatgaga

SEQ ID NO: 40298 - DNA, 21 bp, Artificial Sequence
  source: /note="Description of Artificial Sequence: Synthetic oligonucleotide"
acacactacgacgtcgtcatg

SEQ ID NO: 40299 - DNA, 21 bp, Artificial Sequence
  source: /note="Description of Artificial Sequence: Synthetic oligonucleotide"
acaatcgcagacgaccaaaaa

SEQ ID NO: 40300 - DNA, 21 bp, Artificial Sequence
  source: /note="Description of Artificial Sequence: Synthetic oligonucleotide"
acaatcgcagacatgagaaca

SEQ ID NO: 40301 - DNA, 21 bp, Artificial Sequence
  source: /note="Description of Artificial Sequence: Synthetic oligonucleotide"
acaatctgcaacgacggacca

SEQ ID NO: 40302 - DNA, 21 bp, Artificial Sequence
  source: /note="Description of Artificial Sequence: Synthetic oligonucleotide"
acaatcgacccaccactcaca

SEQ ID NO: 40303 - DNA, 21 bp, Artificial Sequence
  source: /note="Description of Artificial Sequence: Synthetic oligonucleotide"
acaatcgacacaacaagcctc

SEQ ID NO: 40304 - DNA, 21 bp, Artificial Sequence
  source: /note="Description of Artificial Sequence: Synthetic oligonucleotide"
acaatcgaacaaagagaaaga

SEQ ID NO: 40305 - DNA, 21 bp, Artificial Sequence
  source: /note="Description of Artificial Sequence: Synthetic oligonucleotide"
acaatcgaaagcccaggagtc

SEQ ID NO: 40306 - DNA, 21 bp, Artificial Sequence
  source: /note="Description of Artificial Sequence: Synthetic oligonucleotide"
acaatcggacacgaaagctac

SEQ ID NO: 40307 - DNA, 21 bp, Artificial Sequence
  source: /note="Description of Artificial Sequence: Synthetic oligonucleotide"
acaatcggaagactcatgcaa

SEQ ID NO: 40308 - DNA, 21 bp, Artificial Sequence
  source: /note="Description of Artificial Sequence: Synthetic oligonucleotide"
acaatcggaagcgtcagactc

SEQ ID NO: 40309 - DNA, 21 bp, Artificial Sequence
  source: /note="Description of Artificial Sequence: Synthetic oligonucleotide"
acaatccacagaccagacatg

SEQ ID NO: 40310 - DNA, 21 bp, Artificial Sequence
  source: /note="Description of Artificial Sequence: Synthetic oligonucleotide"
acaatcatcccaagcaaactc

SEQ ID NO: 40311 - DNA, 21 bp, Artificial Sequence
  source: /note="Description of Artificial Sequence: Synthetic oligonucleotide"
acaatcatcagaaaagacagc

SEQ ID NO: 40312 - DNA, 21 bp, Artificial Sequence
  source: /note="Description of Artificial Sequence: Synthetic oligonucleotide"
acaatcaaagcacaagtcagc

SEQ ID NO: 40313 - DNA, 21 bp, Artificial Sequence
  source: /note="Description of Artificial Sequence: Synthetic oligonucleotide"
acaatcaaactcaacgtcgga

SEQ ID NO: 40314 - DNA, 21 bp, Artificial Sequence
  source: /note="Description of Artificial Sequence: Synthetic oligonucleotide"
acaatcaaaccactcagccaa

SEQ ID NO: 40315 - DNA, 21 bp, Artificial Sequence
  source: /note="Description of Artificial Sequence: Synthetic oligonucleotide"
acaatcctcaacccaaacaac

SEQ ID NO: 40316 - DNA, 21 bp, Artificial Sequence
  source: /note="Description of Artificial Sequence: Synthetic oligonucleotide"
acaatcctcagaacagaagaa

SEQ ID NO: 40317 - DNA, 21 bp, Artificial Sequence
  source: /note="Description of Artificial Sequence: Synthetic oligonucleotide"
acaatcctcagcagccacgga

SEQ ID NO: 40318 - DNA, 21 bp, Artificial Sequence
  source: /note="Description of Artificial Sequence: Synthetic oligonucleotide"
acaatcctcagcacaggaagc

SEQ ID NO: 40319 - DNA, 21 bp, Artificial Sequence
  source: /note="Description of Artificial Sequence: Synthetic oligonucleotide"
acaatcaaccacgcagaacaa

SEQ ID NO: 40320 - DNA, 21 bp, Artificial Sequence
  source: /note="Description of Artificial Sequence: Synthetic oligonucleotide"
acaatcaactgggtcggagac

SEQ ID NO: 40321 - DNA, 21 bp, Artificial Sequence
  source: /note="Description of Artificial Sequence: Synthetic oligonucleotide"
acaatcccaagccaaatcgca

SEQ ID NO: 40322 - DNA, 21 bp, Artificial Sequence
  source: /note="Description of Artificial Sequence: Synthetic oligonucleotide"
acaatccaactcagaagcgca

SEQ ID NO: 40323 - DNA, 21 bp, Artificial Sequence
  source: /note="Description of Artificial Sequence: Synthetic oligonucleotide"
acaatcagagaagcattcaca

SEQ ID NO: 40324 - DNA, 21 bp, Artificial Sequence
  source: /note="Description of Artificial Sequence: Synthetic oligonucleotide"
acaatcagaggaagcttcctc

SEQ ID NO: 40325 - DNA, 21 bp, Artificial Sequence
  source: /note="Description of Artificial Sequence: Synthetic oligonucleotide"
acaatcagaggaacaatcagc

SEQ ID NO: 40326 - DNA, 21 bp, Artificial Sequence
  source: /note="Description of Artificial Sequence: Synthetic oligonucleotide"
acaatcagagtcaacccaaca

SEQ ID NO: 40327 - DNA, 21 bp, Artificial Sequence
  source: /note="Description of Artificial Sequence: Synthetic oligonucleotide"
acaatcagagtcagcctcgca

SEQ ID NO: 40328 - DNA, 21 bp, Artificial Sequence
  source: /note="Description of Artificial Sequence: Synthetic oligonucleotide"
acaatcagcaacgcaagcagc

SEQ ID NO: 40329 - DNA, 21 bp, Artificial Sequence
  source: /note="Description of Artificial Sequence: Synthetic oligonucleotide"
acaatcagcagcagccaaagc

SEQ ID NO: 40330 - DNA, 21 bp, Artificial Sequence
  source: /note="Description of Artificial Sequence: Synthetic oligonucleotide"
acaatcagcacaagcaaacac

SEQ ID NO: 40331 - DNA, 21 bp, Artificial Sequence
  source: /note="Description of Artificial Sequence: Synthetic oligonucleotide"
acaatcacagcacacgaccca

SEQ ID NO: 40332 - DNA, 21 bp, Artificial Sequence
  source: /note="Description of Artificial Sequence: Synthetic oligonucleotide"
acaatcacaccaagagcagac

SEQ ID NO: 40333 - DNA, 21 bp, Artificial Sequence
  source: /note="Description of Artificial Sequence: Synthetic oligonucleotide"
acaatcacaagcccaaaaatg

SEQ ID NO: 40334 - DNA, 21 bp, Artificial Sequence
  source: /note="Description of Artificial Sequence: Synthetic oligonucleotide"
acaatcacatacgaactcaca

SEQ ID NO: 40335 - DNA, 21 bp, Artificial Sequence
  source: /note="Description of Artificial Sequence: Synthetic oligonucleotide"
acaatcgtcagagaactcaca

SEQ ID NO: 40336 - DNA, 21 bp, Artificial Sequence
  source: /note="Description of Artificial Sequence: Synthetic oligonucleotide"
acaatcgtcagcgacccaaga

SEQ ID NO: 40337 - DNA, 21 bp, Artificial Sequence
  source: /note="Description of Artificial Sequence: Synthetic oligonucleotide"
acaatcgtcagcggagtcgtc

SEQ ID NO: 40338 - DNA, 21 bp, Artificial Sequence
  source: /note="Description of Artificial Sequence: Synthetic oligonucleotide"
acaatcgtcacaggagcaagc

SEQ ID NO: 40339 - DNA, 21 bp, Artificial Sequence
  source: /note="Description of Artificial Sequence: Synthetic oligonucleotide"
acaatctactacgacgtcaca

SEQ ID NO: 40340 - DNA, 21 bp, Artificial Sequence
  source: /note="Description of Artificial Sequence: Synthetic oligonucleotide"
acaaaagcaggaagcttccac

SEQ ID NO: 40341 - DNA, 21 bp, Artificial Sequence
  source: /note="Description of Artificial Sequence: Synthetic oligonucleotide"
acaaaagcacactgctgcgga

SEQ ID NO: 40342 - DNA, 21 bp, Artificial Sequence
  source: /note="Description of Artificial Sequence: Synthetic oligonucleotide"
acaaaagcactcgtccacatg

SEQ ID NO: 40343 - DNA, 21 bp, Artificial Sequence
  source: /note="Description of Artificial Sequence: Synthetic oligonucleotide"
acaaaagaccaagtcagactc

SEQ ID NO: 40344 - DNA, 21 bp, Artificial Sequence
  source: /note="Description of Artificial Sequence: Synthetic oligonucleotide"
acaaaagacagaccattcctc

SEQ ID NO: 40345 - DNA, 21 bp, Artificial Sequence
  source: /note="Description of Artificial Sequence: Synthetic oligonucleotide"
acaaaagaatgcatgctcaca

SEQ ID NO: 40346 - DNA, 21 bp, Artificial Sequence
  source: /note="Description of Artificial Sequence: Synthetic oligonucleotide"
acaaaaggaggattcaacgac

SEQ ID NO: 40347 - DNA, 21 bp, Artificial Sequence
  source: /note="Description of Artificial Sequence: Synthetic oligonucleotide"
acaaaaggaggaaaacaacca

SEQ ID NO: 40348 - DNA, 21 bp, Artificial Sequence
  source: /note="Description of Artificial Sequence: Synthetic oligonucleotide"
acaaaaggaagagaaccagtc

SEQ ID NO: 40349 - DNA, 21 bp, Artificial Sequence
  source: /note="Description of Artificial Sequence: Synthetic oligonucleotide"
acaaaaggagtcccaggatac

SEQ ID NO: 40350 - DNA, 21 bp, Artificial Sequence
  source: /note="Description of Artificial Sequence: Synthetic oligonucleotide"
acaaaacacctcatgccagca

SEQ ID NO: 40351 - DNA, 21 bp, Artificial Sequence
  source: /note="Description of Artificial Sequence: Synthetic oligonucleotide"
acaaaaatcgcaggattcagc

SEQ ID NO: 40352 - DNA, 21 bp, Artificial Sequence
  source: /note="Description of Artificial Sequence: Synthetic oligonucleotide"
acaaaaatcggaagcgcaatg

SEQ ID NO: 40353 - DNA, 21 bp, Artificial Sequence
  source: /note="Description of Artificial Sequence: Synthetic oligonucleotide"
acaaaactcaacgcattcgac

SEQ ID NO: 40354 - DNA, 21 bp, Artificial Sequence
  source: /note="Description of Artificial Sequence: Synthetic oligonucleotide"
acaaaactcccaaacagcagc

SEQ ID NO: 40355 - DNA, 21 bp, Artificial Sequence
  source: /note="Description of Artificial Sequence: Synthetic oligonucleotide"
acaaaactccaagcaagcctc

SEQ ID NO: 40356 - DNA, 21 bp, Artificial Sequence
  source: /note="Description of Artificial Sequence: Synthetic oligonucleotide"
acaaaactcgtcacagaaagc

SEQ ID NO: 40357 - DNA, 21 bp, Artificial Sequence
  source: /note="Description of Artificial Sequence: Synthetic oligonucleotide"
acaaaaatgaacgcaagcgga

SEQ ID NO: 40358 - DNA, 21 bp, Artificial Sequence
  source: /note="Description of Artificial Sequence: Synthetic oligonucleotide"
acaaaaaacctcgaccacaca

SEQ ID NO: 40359 - DNA, 21 bp, Artificial Sequence
  source: /note="Description of Artificial Sequence: Synthetic oligonucleotide"
acaaaaaacctcacagaaaga

SEQ ID NO: 40360 - DNA, 21 bp, Artificial Sequence
  source: /note="Description of Artificial Sequence: Synthetic oligonucleotide"
acaaaaaacagaatggacctc

SEQ ID NO: 40361 - DNA, 21 bp, Artificial Sequence
  source: /note="Description of Artificial Sequence: Synthetic oligonucleotide"
acaaaaccaggaagcatcttc

SEQ ID NO: 40362 - DNA, 21 bp, Artificial Sequence
  source: /note="Description of Artificial Sequence: Synthetic oligonucleotide"
acaaaaccaccagtccaaagc

SEQ ID NO: 40363 - DNA, 21 bp, Artificial Sequence
  source: /note="Description of Artificial Sequence: Synthetic oligonucleotide"
acaaaaccacaaagcagctac

SEQ ID NO: 40364 - DNA, 21 bp, Artificial Sequence
  source: /note="Description of Artificial Sequence: Synthetic oligonucleotide"
acaaaaagagaaagccacagc

SEQ ID NO: 40365 - DNA, 21 bp, Artificial Sequence
  source: /note="Description of Artificial Sequence: Synthetic oligonucleotide"
acaaaaagcgcagcaacagca

SEQ ID NO: 40366 - DNA, 21 bp, Artificial Sequence
  source: /note="Description of Artificial Sequence: Synthetic oligonucleotide"
acaaaaagcggactcacacaa

SEQ ID NO: 40367 - DNA, 21 bp, Artificial Sequence
  source: /note="Description of Artificial Sequence: Synthetic oligonucleotide"
acaaaaagcggaaacagcctc

SEQ ID NO: 40368 - DNA, 21 bp, Artificial Sequence
  source: /note="Description of Artificial Sequence: Synthetic oligonucleotide"
acaaaaagccaaacacacctc

SEQ ID NO: 40369 - DNA, 21 bp, Artificial Sequence
  source: /note="Description of Artificial Sequence: Synthetic oligonucleotide"
acaaaaagcagcgtcctccca

SEQ ID NO: 40370 - DNA, 21 bp, Artificial Sequence
  source: /note="Description of Artificial Sequence: Synthetic oligonucleotide"
acaaaaagctacagcccaaac

SEQ ID NO: 40371 - DNA, 21 bp, Artificial Sequence
  source: /note="Description of Artificial Sequence: Synthetic oligonucleotide"
acaaaaacaggagacggacca

SEQ ID NO: 40372 - DNA, 21 bp, Artificial Sequence
  source: /note="Description of Artificial Sequence: Synthetic oligonucleotide"
acaaaaacaagcttcccaaac

SEQ ID NO: 40373 - DNA, 21 bp, Artificial Sequence
  source: /note="Description of Artificial Sequence: Synthetic oligonucleotide"
acaaaagtcgcactcgaccca

SEQ ID NO: 40374 - DNA, 21 bp, Artificial Sequence
  source: /note="Description of Artificial Sequence: Synthetic oligonucleotide"
acaaaagtcgcaagagaagtc

SEQ ID NO: 40375 - DNA, 21 bp, Artificial Sequence
  source: /note="Description of Artificial Sequence: Synthetic oligonucleotide"
acactcgcactctacgcaagc

SEQ ID NO: 40376 - DNA, 21 bp, Artificial Sequence
  source: /note="Description of Artificial Sequence: Synthetic oligonucleotide"
acactcgcaccaacaacaaaa

SEQ ID NO: 40377 - DNA, 21 bp, Artificial Sequence
  source: /note="Description of Artificial Sequence: Synthetic oligonucleotide"
acactcgcaagcggaagagca

SEQ ID NO: 40378 - DNA, 21 bp, Artificial Sequence
  source: /note="Description of Artificial Sequence: Synthetic oligonucleotide"
acactcgcaagcagaagcgtc

SEQ ID NO: 40379 - DNA, 21 bp, Artificial Sequence
  source: /note="Description of Artificial Sequence: Synthetic oligonucleotide"
acactcgcaacaagcagcaac

SEQ ID NO: 40380 - DNA, 21 bp, Artificial Sequence
  source: /note="Description of Artificial Sequence: Synthetic oligonucleotide"
acactcgcagtcaacagcatg

SEQ ID NO: 40381 - DNA, 21 bp, Artificial Sequence
  source: /note="Description of Artificial Sequence: Synthetic oligonucleotide"
acactcgacatgacaagcgtc

SEQ ID NO: 40382 - DNA, 21 bp, Artificial Sequence
  source: /note="Description of Artificial Sequence: Synthetic oligonucleotide"
acactcgacaacagcagagca

SEQ ID NO: 40383 - DNA, 21 bp, Artificial Sequence
  source: /note="Description of Artificial Sequence: Synthetic oligonucleotide"
acactcgacgtccactacgtc

SEQ ID NO: 40384 - DNA, 21 bp, Artificial Sequence
  source: /note="Description of Artificial Sequence: Synthetic oligonucleotide"
acactcgaagcacaaacagac

SEQ ID NO: 40385 - DNA, 21 bp, Artificial Sequence
  source: /note="Description of Artificial Sequence: Synthetic oligonucleotide"
acactcgaacacacatgcaga

SEQ ID NO: 40386 - DNA, 21 bp, Artificial Sequence
  source: /note="Description of Artificial Sequence: Synthetic oligonucleotide"
acactcgaaccaagaaaagac

SEQ ID NO: 40387 - DNA, 21 bp, Artificial Sequence
  source: /note="Description of Artificial Sequence: Synthetic oligonucleotide"
acactcgaacaattcggaagc

SEQ ID NO: 40388 - DNA, 21 bp, Artificial Sequence
  source: /note="Description of Artificial Sequence: Synthetic oligonucleotide"
acactcgaacaatacaaactc

SEQ ID NO: 40389 - DNA, 21 bp, Artificial Sequence
  source: /note="Description of Artificial Sequence: Synthetic oligonucleotide"
acactcgaaagaaaactcgac

SEQ ID NO: 40390 - DNA, 21 bp, Artificial Sequence
  source: /note="Description of Artificial Sequence: Synthetic oligonucleotide"
acactcgaaagaccattcatc

SEQ ID NO: 40391 - DNA, 21 bp, Artificial Sequence
  source: /note="Description of Artificial Sequence: Synthetic oligonucleotide"
acactcttcaacagcgaaaaa

SEQ ID NO: 40392 - DNA, 21 bp, Artificial Sequence
  source: /note="Description of Artificial Sequence: Synthetic oligonucleotide"
acactcttccaacaaccacca

SEQ ID NO: 40393 - DNA, 21 bp, Artificial Sequence
  source: /note="Description of Artificial Sequence: Synthetic oligonucleotide"
acactcttcagagacggaagc

SEQ ID NO: 40394 - DNA, 21 bp, Artificial Sequence
  source: /note="Description of Artificial Sequence: Synthetic oligonucleotide"
acactcggaggaagcccagtc

SEQ ID NO: 40395 - DNA, 21 bp, Artificial Sequence
  source: /note="Description of Artificial Sequence: Synthetic oligonucleotide"
acactcggaggaagcagagca

SEQ ID NO: 40396 - DNA, 21 bp, Artificial Sequence
  source: /note="Description of Artificial Sequence: Synthetic oligonucleotide"
acactcggacacgcattcgca

SEQ ID NO: 40397 - DNA, 21 bp, Artificial Sequence
  source: /note="Description of Artificial Sequence: Synthetic oligonucleotide"
acactcggacacgtcccacca

SEQ ID NO: 40398 - DNA, 21 bp, Artificial Sequence
  source: /note="Description of Artificial Sequence: Synthetic oligonucleotide"
acactcggaatcacagcacac

SEQ ID NO: 40399 - DNA, 21 bp, Artificial Sequence
  source: /note="Description of Artificial Sequence: Synthetic oligonucleotide"
acactcggaatcgtcacacaa

SEQ ID NO: 40400 - DNA, 21 bp, Artificial Sequence
  source: /note="Description of Artificial Sequence: Synthetic oligonucleotide"
acactcggactcacaatgcca

SEQ ID NO: 40401 - DNA, 21 bp, Artificial Sequence
  source: /note="Description of Artificial Sequence: Synthetic oligonucleotide"
acactcggaccaaacagcaga

SEQ ID NO: 40402 - DNA, 21 bp, Artificial Sequence
  source: /note="Description of Artificial Sequence: Synthetic oligonucleotide"
acactcggacaaacaacagga

SEQ ID NO: 40403 - DNA, 21 bp, Artificial Sequence
  source: /note="Description of Artificial Sequence: Synthetic oligonucleotide"
acactccaccaaatcccagca

SEQ ID NO: 40404 - DNA, 21 bp, Artificial Sequence
  source: /note="Description of Artificial Sequence: Synthetic oligonucleotide"
acactccacagcagcagcagc

SEQ ID NO: 40405 - DNA, 21 bp, Artificial Sequence
  source: /note="Description of Artificial Sequence: Synthetic oligonucleotide"
acactcatcggaaacgacaca

SEQ ID NO: 40406 - DNA, 21 bp, Artificial Sequence
  source: /note="Description of Artificial Sequence: Synthetic oligonucleotide"
acactcatcagcagcgtcaca

SEQ ID NO: 40407 - DNA, 21 bp, Artificial Sequence
  source: /note="Description of Artificial Sequence: Synthetic oligonucleotide"
acactcaaagcagaagacctc

SEQ ID NO: 40408 - DNA, 21 bp, Artificial Sequence
  source: /note="Description of Artificial Sequence: Synthetic oligonucleotide"
acactcaaaggaccaggacaa

SEQ ID NO: 40409 - DNA, 21 bp, Artificial Sequence
  source: /note="Description of Artificial Sequence: Synthetic oligonucleotide"
acactcaaaagaggactcgac

SEQ ID NO: 40410 - DNA, 21 bp, Artificial Sequence
  source: /note="Description of Artificial Sequence: Synthetic oligonucleotide"
acactcaaaagcaacgcaaaa

SEQ ID NO: 40411 - DNA, 21 bp, Artificial Sequence
  source: /note="Description of Artificial Sequence: Synthetic oligonucleotide"
acactcctcccagcaagccca

SEQ ID NO: 40412 - DNA, 21 bp, Artificial Sequence
  source: /note="Description of Artificial Sequence: Synthetic oligonucleotide"
acactcctcccaggagaccca

SEQ ID NO: 40413 - DNA, 21 bp, Artificial Sequence
  source: /note="Description of Artificial Sequence: Synthetic oligonucleotide"
acactcctcccacacccaaca

SEQ ID NO: 40414 - DNA, 21 bp, Artificial Sequence
  source: /note="Description of Artificial Sequence: Synthetic oligonucleotide"
acactcctcacagacgacctc

SEQ ID NO: 40415 - DNA, 21 bp, Artificial Sequence
  source: /note="Description of Artificial Sequence: Synthetic oligonucleotide"
acactcatgcaagtcagcgga

SEQ ID NO: 40416 - DNA, 21 bp, Artificial Sequence
  source: /note="Description of Artificial Sequence: Synthetic oligonucleotide"
acactcatgagaggagcaagc

SEQ ID NO: 40417 - DNA, 21 bp, Artificial Sequence
  source: /note="Description of Artificial Sequence: Synthetic oligonucleotide"
acactcaacagcgcaaaaaaa

SEQ ID NO: 40418 - DNA, 21 bp, Artificial Sequence
  source: /note="Description of Artificial Sequence: Synthetic oligonucleotide"
acactcaacagcgaaagaatg

SEQ ID NO: 40419 - DNA, 21 bp, Artificial Sequence
  source: /note="Description of Artificial Sequence: Synthetic oligonucleotide"
acactcccacacagagtcgca

SEQ ID NO: 40420 - DNA, 21 bp, Artificial Sequence
  source: /note="Description of Artificial Sequence: Synthetic oligonucleotide"
acactcccacacagcccaaaa

SEQ ID NO: 40421 - DNA, 21 bp, Artificial Sequence
  source: /note="Description of Artificial Sequence: Synthetic oligonucleotide"
acactcccaaaaacaaacctc

SEQ ID NO: 40422 - DNA, 21 bp, Artificial Sequence
  source: /note="Description of Artificial Sequence: Synthetic oligonucleotide"
acactcccactcacaagcaca

SEQ ID NO: 40423 - DNA, 21 bp, Artificial Sequence
  source: /note="Description of Artificial Sequence: Synthetic oligonucleotide"
acactcccaaactacctcgca

SEQ ID NO: 40424 - DNA, 21 bp, Artificial Sequence
  source: /note="Description of Artificial Sequence: Synthetic oligonucleotide"
acactcccaccaaacagccca

SEQ ID NO: 40425 - DNA, 21 bp, Artificial Sequence
  source: /note="Description of Artificial Sequence: Synthetic oligonucleotide"
acactcccaagcgaaagagtc

SEQ ID NO: 40426 - DNA, 21 bp, Artificial Sequence
  source: /note="Description of Artificial Sequence: Synthetic oligonucleotide"
acactcccaacaacactcgtc

SEQ ID NO: 40427 - DNA, 21 bp, Artificial Sequence
  source: /note="Description of Artificial Sequence: Synthetic oligonucleotide"
acactcccagtcaacaacctc

SEQ ID NO: 40428 - DNA, 21 bp, Artificial Sequence
  source: /note="Description of Artificial Sequence: Synthetic oligonucleotide"
acactccaagacaacagagca

SEQ ID NO: 40429 - DNA, 21 bp, Artificial Sequence
  source: /note="Description of Artificial Sequence: Synthetic oligonucleotide"
acactccaagaaggaacagga

SEQ ID NO: 40430 - DNA, 21 bp, Artificial Sequence
  source: /note="Description of Artificial Sequence: Synthetic oligonucleotide"
acactccaattcggagcagga

SEQ ID NO: 40431 - DNA, 21 bp, Artificial Sequence
  source: /note="Description of Artificial Sequence: Synthetic oligonucleotide"
acactccaaggaggaagcctc

SEQ ID NO: 40432 - DNA, 21 bp, Artificial Sequence
  source: /note="Description of Artificial Sequence: Synthetic oligonucleotide"
acactccaaccactcagaatc

SEQ ID NO: 40433 - DNA, 21 bp, Artificial Sequence
  source: /note="Description of Artificial Sequence: Synthetic oligonucleotide"
acactcagagacacagcagac

SEQ ID NO: 40434 - DNA, 21 bp, Artificial Sequence
  source: /note="Description of Artificial Sequence: Synthetic oligonucleotide"
acactcagagaaagcgacaca

SEQ ID NO: 40435 - DNA, 21 bp, Artificial Sequence
  source: /note="Description of Artificial Sequence: Synthetic oligonucleotide"
acactcagaggagcagaagac

SEQ ID NO: 40436 - DNA, 21 bp, Artificial Sequence
  source: /note="Description of Artificial Sequence: Synthetic oligonucleotide"
acactcagactcacagcagga

SEQ ID NO: 40437 - DNA, 21 bp, Artificial Sequence
  source: /note="Description of Artificial Sequence: Synthetic oligonucleotide"
acactcagaatgcaactcaac

SEQ ID NO: 40438 - DNA, 21 bp, Artificial Sequence
  source: /note="Description of Artificial Sequence: Synthetic oligonucleotide"
acactcagaaacagcccagca

SEQ ID NO: 40439 - DNA, 21 bp, Artificial Sequence
  source: /note="Description of Artificial Sequence: Synthetic oligonucleotide"
acactcagaccactccaagca

SEQ ID NO: 40440 - DNA, 21 bp, Artificial Sequence
  source: /note="Description of Artificial Sequence: Synthetic oligonucleotide"
acactcagaagcgcaggacca

SEQ ID NO: 40441 - DNA, 21 bp, Artificial Sequence
  source: /note="Description of Artificial Sequence: Synthetic oligonucleotide"
acactcagaacactcgcagaa

SEQ ID NO: 40442 - DNA, 21 bp, Artificial Sequence
  source: /note="Description of Artificial Sequence: Synthetic oligonucleotide"
acactcagcgcactcccacca

SEQ ID NO: 40443 - DNA, 21 bp, Artificial Sequence
  source: /note="Description of Artificial Sequence: Synthetic oligonucleotide"
acactcagcgacagaccacca

SEQ ID NO: 40444 - DNA, 21 bp, Artificial Sequence
  source: /note="Description of Artificial Sequence: Synthetic oligonucleotide"
acactcagcgacagcgtcgac

SEQ ID NO: 40445 - DNA, 21 bp, Artificial Sequence
  source: /note="Description of Artificial Sequence: Synthetic oligonucleotide"
acactcagcgaaaacctccca

SEQ ID NO: 40446 - DNA, 21 bp, Artificial Sequence
  source: /note="Description of Artificial Sequence: Synthetic oligonucleotide"
acactcagccacctcccatac

SEQ ID NO: 40447 - DNA, 21 bp, Artificial Sequence
  source: /note="Description of Artificial Sequence: Synthetic oligonucleotide"
acactcagccacaacgcacca

SEQ ID NO: 40448 - DNA, 21 bp, Artificial Sequence
  source: /note="Description of Artificial Sequence: Synthetic oligonucleotide"
acactcagccacagactccca

SEQ ID NO: 40449 - DNA, 21 bp, Artificial Sequence
  source: /note="Description of Artificial Sequence: Synthetic oligonucleotide"
acactcagcaaacacctcctc

SEQ ID NO: 40450 - DNA, 21 bp, Artificial Sequence
  source: /note="Description of Artificial Sequence: Synthetic oligonucleotide"
acactcagcaaaccaccaagc

SEQ ID NO: 40451 - DNA, 21 bp, Artificial Sequence
  source: /note="Description of Artificial Sequence: Synthetic oligonucleotide"
acactcagcctcagcgcaatc

SEQ ID NO: 40452 - DNA, 21 bp, Artificial Sequence
  source: /note="Description of Artificial Sequence: Synthetic oligonucleotide"
acactcagcctcagcaacaac

SEQ ID NO: 40453 - DNA, 21 bp, Artificial Sequence
  source: /note="Description of Artificial Sequence: Synthetic oligonucleotide"
acactcagcctcagcacagga

SEQ ID NO: 40454 - DNA, 21 bp, Artificial Sequence
  source: /note="Description of Artificial Sequence: Synthetic oligonucleotide"
acactcagcaacagcgtccca

SEQ ID NO: 40455 - DNA, 21 bp, Artificial Sequence
  source: /note="Description of Artificial Sequence: Synthetic oligonucleotide"
acactcagcccaaaaagcgtc

SEQ ID NO: 40456 - DNA, 21 bp, Artificial Sequence
  source: /note="Description of Artificial Sequence: Synthetic oligonucleotide"
acactcagcccaagcggaagc

SEQ ID NO: 40457 - DNA, 21 bp, Artificial Sequence
  source: /note="Description of Artificial Sequence: Synthetic oligonucleotide"
acactcagcccaacaacaagc

SEQ ID NO: 40458 - DNA, 21 bp, Artificial Sequence
  source: /note="Description of Artificial Sequence: Synthetic oligonucleotide"
acactcagccaaagaccacca

SEQ ID NO: 40459 - DNA, 21 bp, Artificial Sequence
  source: /note="Description of Artificial Sequence: Synthetic oligonucleotide"
acactcagccaaagcacacac

SEQ ID NO: 40460 - DNA, 21 bp, Artificial Sequence
  source: /note="Description of Artificial Sequence: Synthetic oligonucleotide"
acactcagcagaacactcgaa

SEQ ID NO: 40461 - DNA, 21 bp, Artificial Sequence
  source: /note="Description of Artificial Sequence: Synthetic oligonucleotide"
acactcagcagcggacaaaca

SEQ ID NO: 40462 - DNA, 21 bp, Artificial Sequence
  source: /note="Description of Artificial Sequence: Synthetic oligonucleotide"
acactcagcagcagaccaatg

SEQ ID NO: 40463 - DNA, 21 bp, Artificial Sequence
  source: /note="Description of Artificial Sequence: Synthetic oligonucleotide"
acactcagcagcagacaaagc

SEQ ID NO: 40464 - DNA, 21 bp, Artificial Sequence
  source: /note="Description of Artificial Sequence: Synthetic oligonucleotide"
acactcagcacagtcagcctc

SEQ ID NO: 40465 - DNA, 21 bp, Artificial Sequence
  source: /note="Description of Artificial Sequence: Synthetic oligonucleotide"
acactcagctacacaccagca

SEQ ID NO: 40466 - DNA, 21 bp, Artificial Sequence
  source: /note="Description of Artificial Sequence: Synthetic oligonucleotide"
acactcacattcagaggagac

SEQ ID NO: 40467 - DNA, 21 bp, Artificial Sequence
  source: /note="Description of Artificial Sequence: Synthetic oligonucleotide"
acactcacaaaaaacagcaca

SEQ ID NO: 40468 - DNA, 21 bp, Artificial Sequence
  source: /note="Description of Artificial Sequence: Synthetic oligonucleotide"
acactcacaccactctacgaa

SEQ ID NO: 40469 - DNA, 21 bp, Artificial Sequence
  source: /note="Description of Artificial Sequence: Synthetic oligonucleotide"
acactcacaccaaacgaaagc

SEQ ID NO: 40470 - DNA, 21 bp, Artificial Sequence
  source: /note="Description of Artificial Sequence: Synthetic oligonucleotide"
acactcacaagactcagccca

SEQ ID NO: 40471 - DNA, 21 bp, Artificial Sequence
  source: /note="Description of Artificial Sequence: Synthetic oligonucleotide"
acactcacaagaatgaacgtc

SEQ ID NO: 40472 - DNA, 21 bp, Artificial Sequence
  source: /note="Description of Artificial Sequence: Synthetic oligonucleotide"
acactcacaacaaacgtcagc

SEQ ID NO: 40473 - DNA, 21 bp, Artificial Sequence
  source: /note="Description of Artificial Sequence: Synthetic oligonucleotide"
acactcacaacaccaatgaac

SEQ ID NO: 40474 - DNA, 21 bp, Artificial Sequence
  source: /note="Description of Artificial Sequence: Synthetic oligonucleotide"
acactcacagtcctcgaccca

SEQ ID NO: 40475 - DNA, 21 bp, Artificial Sequence
  source: /note="Description of Artificial Sequence: Synthetic oligonucleotide"
acactcacataccacagagac

SEQ ID NO: 40476 - DNA, 21 bp, Artificial Sequence
  source: /note="Description of Artificial Sequence: Synthetic oligonucleotide"
acactcgtcggacactactac

SEQ ID NO: 40477 - DNA, 21 bp, Artificial Sequence
  source: /note="Description of Artificial Sequence: Synthetic oligonucleotide"
acactcgtcggaccagcaagc

SEQ ID NO: 40478 - DNA, 21 bp, Artificial Sequence
  source: /note="Description of Artificial Sequence: Synthetic oligonucleotide"
acactcgtcccaagagacctc

SEQ ID NO: 40479 - DNA, 21 bp, Artificial Sequence
  source: /note="Description of Artificial Sequence: Synthetic oligonucleotide"
acactcgtccaagcagaaatg

SEQ ID NO: 40480 - DNA, 21 bp, Artificial Sequence
  source: /note="Description of Artificial Sequence: Synthetic oligonucleotide"
acactcgtcacaagagaaaac

SEQ ID NO: 40481 - DNA, 21 bp, Artificial Sequence
  source: /note="Description of Artificial Sequence: Synthetic oligonucleotide"
acactcgtcgtcagaagccca

SEQ ID NO: 40482 - DNA, 21 bp, Artificial Sequence
  source: /note="Description of Artificial Sequence: Synthetic oligonucleotide"
acactctacggacacccaagc

SEQ ID NO: 40483 - DNA, 21 bp, Artificial Sequence
  source: /note="Description of Artificial Sequence: Synthetic oligonucleotide"
acactctacctccacagcgaa

SEQ ID NO: 40484 - DNA, 21 bp, Artificial Sequence
  source: /note="Description of Artificial Sequence: Synthetic oligonucleotide"
acactctacaacacaacaatg

SEQ ID NO: 40485 - DNA, 21 bp, Artificial Sequence
  source: /note="Description of Artificial Sequence: Synthetic oligonucleotide"
acactctacagagtcaaccca

SEQ ID NO: 40486 - DNA, 21 bp, Artificial Sequence
  source: /note="Description of Artificial Sequence: Synthetic oligonucleotide"
acactctacagccaaagcgaa

SEQ ID NO: 40487 - DNA, 21 bp, Artificial Sequence
  source: /note="Description of Artificial Sequence: Synthetic oligonucleotide"
acactctacacaaacagcgtc

SEQ ID NO: 40488 - DNA, 21 bp, Artificial Sequence
  source: /note="Description of Artificial Sequence: Synthetic oligonucleotide"
acaatggcaatgaacccaaga

SEQ ID NO: 40489 - DNA, 21 bp, Artificial Sequence
  source: /note="Description of Artificial Sequence: Synthetic oligonucleotide"
acaatggcaccaagagacctc

SEQ ID NO: 40490 - DNA, 21 bp, Artificial Sequence
  source: /note="Description of Artificial Sequence: Synthetic oligonucleotide"
acaatggacaacctcagacaa

SEQ ID NO: 40491 - DNA, 21 bp, Artificial Sequence
  source: /note="Description of Artificial Sequence: Synthetic oligonucleotide"
acaatggacagaacaccagga

SEQ ID NO: 40492 - DNA, 21 bp, Artificial Sequence
  source: /note="Description of Artificial Sequence: Synthetic oligonucleotide"
acaatggacgtcctcagcttc

SEQ ID NO: 40493 - DNA, 21 bp, Artificial Sequence
  source: /note="Description of Artificial Sequence: Synthetic oligonucleotide"
acaatggaaagaggagacagc

SEQ ID NO: 40494 - DNA, 21 bp, Artificial Sequence
  source: /note="Description of Artificial Sequence: Synthetic oligonucleotide"
acaatgcacgcacacccactc

SEQ ID NO: 40495 - DNA, 21 bp, Artificial Sequence
  source: /note="Description of Artificial Sequence: Synthetic oligonucleotide"
acaatgctcacaagaacagga

SEQ ID NO: 40496 - DNA, 21 bp, Artificial Sequence
  source: /note="Description of Artificial Sequence: Synthetic oligonucleotide"
acaatgatgaaaccactcgac

SEQ ID NO: 40497 - DNA, 21 bp, Artificial Sequence
  source: /note="Description of Artificial Sequence: Synthetic oligonucleotide"
acaatgaacaaaccaacactc

SEQ ID NO: 40498 - DNA, 21 bp, Artificial Sequence
  source: /note="Description of Artificial Sequence: Synthetic oligonucleotide"
acaatgaacctcggagaaatg

SEQ ID NO: 40499 - DNA, 21 bp, Artificial Sequence
  source: /note="Description of Artificial Sequence: Synthetic oligonucleotide"
acaatgaacccaacacaaaac

SEQ ID NO: 40500 - DNA, 21 bp, Artificial Sequence
  source: /note="Description of Artificial Sequence: Synthetic oligonucleotide"
acaatgaacacactcgtcaca

SEQ ID NO: 40501 - DNA, 21 bp, Artificial Sequence
  source: /note="Description of Artificial Sequence: Synthetic oligonucleotide"
acaatgccaaaccacggacca

SEQ ID NO: 40502 - DNA, 21 bp, Artificial Sequence
  source: /note="Description of Artificial Sequence: Synthetic oligonucleotide"
acaatgccaagcgaaagcgtc

SEQ ID NO: 40503 - DNA, 21 bp, Artificial Sequence
  source: /note="Description of Artificial Sequence: Synthetic oligonucleotide"
acaatgcaagcaccaagcgca

SEQ ID NO: 40504 - DNA, 21 bp, Artificial Sequence
  source: /note="Description of Artificial Sequence: Synthetic oligonucleotide"
acaatgcaatacggaagcaca

SEQ ID NO: 40505 - DNA, 21 bp, Artificial Sequence
  source: /note="Description of Artificial Sequence: Synthetic oligonucleotide"
acaatgagagaaggaccagca

SEQ ID NO: 40506 - DNA, 21 bp, Artificial Sequence
  source: /note="Description of Artificial Sequence: Synthetic oligonucleotide"
acaatgagaatcgacctccca

SEQ ID NO: 40507 - DNA, 21 bp, Artificial Sequence
  source: /note="Description of Artificial Sequence: Synthetic oligonucleotide"
acaatgagaagcagcgaaatc

SEQ ID NO: 40508 - DNA, 21 bp, Artificial Sequence
  source: /note="Description of Artificial Sequence: Synthetic oligonucleotide"
acaatgagaacaaacccagac

SEQ ID NO: 40509 - DNA, 21 bp, Artificial Sequence
  source: /note="Description of Artificial Sequence: Synthetic oligonucleotide"
acaatgagcggaacaagcaga

SEQ ID NO: 40510 - DNA, 21 bp, Artificial Sequence
  source: /note="Description of Artificial Sequence: Synthetic oligonucleotide"
acaatgagcatcgcactcgca

SEQ ID NO: 40511 - DNA, 21 bp, Artificial Sequence
  source: /note="Description of Artificial Sequence: Synthetic oligonucleotide"
acaatgagcaaaccaagctac

SEQ ID NO: 40512 - DNA, 21 bp, Artificial Sequence
  source: /note="Description of Artificial Sequence: Synthetic oligonucleotide"
acaatgagcatgagcatcaca

SEQ ID NO: 40513 - DNA, 21 bp, Artificial Sequence
  source: /note="Description of Artificial Sequence: Synthetic oligonucleotide"
acaatgagcccaggaaacaac

SEQ ID NO: 40514 - DNA, 21 bp, Artificial Sequence
  source: /note="Description of Artificial Sequence: Synthetic oligonucleotide"
acaatgagcccacacagccca

SEQ ID NO: 40515 - DNA, 21 bp, Artificial Sequence
  source: /note="Description of Artificial Sequence: Synthetic oligonucleotide"
acaatgagcccactcaacaga

SEQ ID NO: 40516 - DNA, 21 bp, Artificial Sequence
  source: /note="Description of Artificial Sequence: Synthetic oligonucleotide"
acaatgacacaccaccaattc

SEQ ID NO: 40517 - DNA, 21 bp, Artificial Sequence
  source: /note="Description of Artificial Sequence: Synthetic oligonucleotide"
acaatgacaagaagcatgctc

SEQ ID NO: 40518 - DNA, 21 bp, Artificial Sequence
  source: /note="Description of Artificial Sequence: Synthetic oligonucleotide"
acaatgacagtcctcacaatg

SEQ ID NO: 40519 - DNA, 21 bp, Artificial Sequence
  source: /note="Description of Artificial Sequence: Synthetic oligonucleotide"
acaatggtcgcaagcatggca

SEQ ID NO: 40520 - DNA, 21 bp, Artificial Sequence
  source: /note="Description of Artificial Sequence: Synthetic oligonucleotide"
acaatggtcaaacaaggaaac

SEQ ID NO: 40521 - DNA, 21 bp, Artificial Sequence
  source: /note="Description of Artificial Sequence: Synthetic oligonucleotide"
acaatggtcagcggaggacac

SEQ ID NO: 40522 - DNA, 21 bp, Artificial Sequence
  source: /note="Description of Artificial Sequence: Synthetic oligonucleotide"
acaatggtcgtcgtcagcagc

SEQ ID NO: 40523 - DNA, 21 bp, Artificial Sequence
  source: /note="Description of Artificial Sequence: Synthetic oligonucleotide"
acaatggtctacacagacaac

SEQ ID NO: 40524 - DNA, 21 bp, Artificial Sequence
  source: /note="Description of Artificial Sequence: Synthetic oligonucleotide"
acaaacgcagcactccaaagc

SEQ ID NO: 40525 - DNA, 21 bp, Artificial Sequence
  source: /note="Description of Artificial Sequence: Synthetic oligonucleotide"
acaaacgcaatcaaaagcgga

SEQ ID NO: 40526 - DNA, 21 bp, Artificial Sequence
  source: /note="Description of Artificial Sequence: Synthetic oligonucleotide"
acaaacgcaagctggccacca

SEQ ID NO: 40527 - DNA, 21 bp, Artificial Sequence
  source: /note="Description of Artificial Sequence: Synthetic oligonucleotide"
acaaacgacccaatgatgcca

SEQ ID NO: 40528 - DNA, 21 bp, Artificial Sequence
  source: /note="Description of Artificial Sequence: Synthetic oligonucleotide"
acaaacgaacacaaattcagc

SEQ ID NO: 40529 - DNA, 21 bp, Artificial Sequence
  source: /note="Description of Artificial Sequence: Synthetic oligonucleotide"
acaaacgaaagcagcggaaca

SEQ ID NO: 40530 - DNA, 21 bp, Artificial Sequence
  source: /note="Description of Artificial Sequence: Synthetic oligonucleotide"
acaaacttcctcccacacgga

SEQ ID NO: 40531 - DNA, 21 bp, Artificial Sequence
  source: /note="Description of Artificial Sequence: Synthetic oligonucleotide"
acaaacttcccacaaagcgca

SEQ ID NO: 40532 - DNA, 21 bp, Artificial Sequence
  source: /note="Description of Artificial Sequence: Synthetic oligonucleotide"
acaaacttccaactcacagtc

SEQ ID NO: 40533 - DNA, 21 bp, Artificial Sequence
  source: /note="Description of Artificial Sequence: Synthetic oligonucleotide"
acaaacggaagagtcacagca

SEQ ID NO: 40534 - DNA, 21 bp, Artificial Sequence
  source: /note="Description of Artificial Sequence: Synthetic oligonucleotide"
acaaacggaacaaaaccaaca

SEQ ID NO: 40535 - DNA, 21 bp, Artificial Sequence
  source: /note="Description of Artificial Sequence: Synthetic oligonucleotide"
acaaacggagtcaaactcagc

SEQ ID NO: 40536 - DNA, 21 bp, Artificial Sequence
  source: /note="Description of Artificial Sequence: Synthetic oligonucleotide"
acaaaccacatcgcagcactc

SEQ ID NO: 40537 - DNA, 21 bp, Artificial Sequence
  source: /note="Description of Artificial Sequence: Synthetic oligonucleotide"
acaaaccacagcagcccactc

SEQ ID NO: 40538 - DNA, 21 bp, Artificial Sequence
  source: /note="Description of Artificial Sequence: Synthetic oligonucleotide"
acaaacaaaacagtcggatgc

SEQ ID NO: 40539 - DNA, 21 bp, Artificial Sequence
  source: /note="Description of Artificial Sequence: Synthetic oligonucleotide"
acaaacctcgcagcaagacca

SEQ ID NO: 40540 - DNA, 21 bp, Artificial Sequence
  source: /note="Description of Artificial Sequence: Synthetic oligonucleotide"
acaaacctcaaaagaatggac

SEQ ID NO: 40541 - DNA, 21 bp, Artificial Sequence
  source: /note="Description of Artificial Sequence: Synthetic oligonucleotide"
acaaacctcaacggaaacgac

SEQ ID NO: 40542 - DNA, 21 bp, Artificial Sequence
  source: /note="Description of Artificial Sequence: Synthetic oligonucleotide"
acaaacctcaacacaagacca

SEQ ID NO: 40543 - DNA, 21 bp, Artificial Sequence
  source: /note="Description of Artificial Sequence: Synthetic oligonucleotide"
acaaacctcagaagcgaactc

SEQ ID NO: 40544 - DNA, 21 bp, Artificial Sequence
  source: /note="Description of Artificial Sequence: Synthetic oligonucleotide"
acaaacctcagaacagcagtc

SEQ ID NO: 40545 - DNA, 21 bp, Artificial Sequence
  source: /note="Description of Artificial Sequence: Synthetic oligonucleotide"
acaaacatgaaaacagacagc

SEQ ID NO: 40546 - DNA, 21 bp, Artificial Sequence
  source: /note="Description of Artificial Sequence: Synthetic oligonucleotide"
acaaacatgccaatgaaccca

SEQ ID NO: 40547 - DNA, 21 bp, Artificial Sequence
  source: /note="Description of Artificial Sequence: Synthetic oligonucleotide"
acaaacatgccaccactccca

SEQ ID NO: 40548 - DNA, 21 bp, Artificial Sequence
  source: /note="Description of Artificial Sequence: Synthetic oligonucleotide"
acaaacatgccaccactcaca

SEQ ID NO: 40549 - DNA, 21 bp, Artificial Sequence
  source: /note="Description of Artificial Sequence: Synthetic oligonucleotide"
acaaacaacggaggaatgtac

SEQ ID NO: 40550 - DNA, 21 bp, Artificial Sequence
  source: /note="Description of Artificial Sequence: Synthetic oligonucleotide"
acaaacaacagcacaaaccca

SEQ ID NO: 40551 - DNA, 21 bp, Artificial Sequence
  source: /note="Description of Artificial Sequence: Synthetic oligonucleotide"
acaaacccagcaccaaacagc

SEQ ID NO: 40552 - DNA, 21 bp, Artificial Sequence
  source: /note="Description of Artificial Sequence: Synthetic oligonucleotide"
acaaacccaggaccactcgac

SEQ ID NO: 40553 - DNA, 21 bp, Artificial Sequence
  source: /note="Description of Artificial Sequence: Synthetic oligonucleotide"
acaaacccacacagagacaca

SEQ ID NO: 40554 - DNA, 21 bp, Artificial Sequence
  source: /note="Description of Artificial Sequence: Synthetic oligonucleotide"
acaaacccactcagcacagga

SEQ ID NO: 40555 - DNA, 21 bp, Artificial Sequence
  source: /note="Description of Artificial Sequence: Synthetic oligonucleotide"
acaaacccaaacaacgcaaac

SEQ ID NO: 40556 - DNA, 21 bp, Artificial Sequence
  source: /note="Description of Artificial Sequence: Synthetic oligonucleotide"
acaaacccaagaagctacaca

SEQ ID NO: 40557 - DNA, 21 bp, Artificial Sequence
  source: /note="Description of Artificial Sequence: Synthetic oligonucleotide"
acaaacccaagcgcactcgga

SEQ ID NO: 40558 - DNA, 21 bp, Artificial Sequence
  source: /note="Description of Artificial Sequence: Synthetic oligonucleotide"
acaaacccaagcatgtgcctc

SEQ ID NO: 40559 - DNA, 21 bp, Artificial Sequence
  source: /note="Description of Artificial Sequence: Synthetic oligonucleotide"
acaaacccaacaagcatggca

SEQ ID NO: 40560 - DNA, 21 bp, Artificial Sequence
  source: /note="Description of Artificial Sequence: Synthetic oligonucleotide"
acaaacccagtcctcacagaa

SEQ ID NO: 40561 - DNA, 21 bp, Artificial Sequence
  source: /note="Description of Artificial Sequence: Synthetic oligonucleotide"
acaaacccagtcagactcgtc

SEQ ID NO: 40562 - DNA, 21 bp, Artificial Sequence
  source: /note="Description of Artificial Sequence: Synthetic oligonucleotide"
acaaacccagtcagaacaagc

SEQ ID NO: 40563 - DNA, 21 bp, Artificial Sequence
  source: /note="Description of Artificial Sequence: Synthetic oligonucleotide"
acaaacagaggatggacagac

SEQ ID NO: 40564 - DNA, 21 bp, Artificial Sequence
  source: /note="Description of Artificial Sequence: Synthetic oligonucleotide"
acaaacagaaacagcgaagtc

SEQ ID NO: 40565 - DNA, 21 bp, Artificial Sequence
  source: /note="Description of Artificial Sequence: Synthetic oligonucleotide"
acaaacagaccaatcgacaca

SEQ ID NO: 40566 - DNA, 21 bp, Artificial Sequence
  source: /note="Description of Artificial Sequence: Synthetic oligonucleotide"
acaaacagacaagcaagcaca

SEQ ID NO: 40567 - DNA, 21 bp, Artificial Sequence
  source: /note="Description of Artificial Sequence: Synthetic oligonucleotide"
acaaacagacaagacacaaga

SEQ ID NO: 40568 - DNA, 21 bp, Artificial Sequence
  source: /note="Description of Artificial Sequence: Synthetic oligonucleotide"
acaaacagcgcaatcagcgga

SEQ ID NO: 40569 - DNA, 21 bp, Artificial Sequence
  source: /note="Description of Artificial Sequence: Synthetic oligonucleotide"
acaaacagcggaagcgacgca

SEQ ID NO: 40570 - DNA, 21 bp, Artificial Sequence
  source: /note="Description of Artificial Sequence: Synthetic oligonucleotide"
acaaacagccacgcaatgctc

SEQ ID NO: 40571 - DNA, 21 bp, Artificial Sequence
  source: /note="Description of Artificial Sequence: Synthetic oligonucleotide"
acaaacagcctcccagcactc

SEQ ID NO: 40572 - DNA, 21 bp, Artificial Sequence
  source: /note="Description of Artificial Sequence: Synthetic oligonucleotide"
acaaacagcatgggagtccca

SEQ ID NO: 40573 - DNA, 21 bp, Artificial Sequence
  source: /note="Description of Artificial Sequence: Synthetic oligonucleotide"
acaaacagcaaccacacatac

SEQ ID NO: 40574 - DNA, 21 bp, Artificial Sequence
  source: /note="Description of Artificial Sequence: Synthetic oligonucleotide"
acaaacagcccaagcagaagc

SEQ ID NO: 40575 - DNA, 21 bp, Artificial Sequence
  source: /note="Description of Artificial Sequence: Synthetic oligonucleotide"
acaaacacagacgtcacaaaa

SEQ ID NO: 40576 - DNA, 21 bp, Artificial Sequence
  source: /note="Description of Artificial Sequence: Synthetic oligonucleotide"
acaaacacaagaacaccatac

SEQ ID NO: 40577 - DNA, 21 bp, Artificial Sequence
  source: /note="Description of Artificial Sequence: Synthetic oligonucleotide"
acaaacacaagcgcaagcaga

SEQ ID NO: 40578 - DNA, 21 bp, Artificial Sequence
  source: /note="Description of Artificial Sequence: Synthetic oligonucleotide"
acaaacacaagcagcacatac

SEQ ID NO: 40579 - DNA, 21 bp, Artificial Sequence
  source: /note="Description of Artificial Sequence: Synthetic oligonucleotide"
acaaacacaacaatcaacctc

SEQ ID NO: 40580 - DNA, 21 bp, Artificial Sequence
  source: /note="Description of Artificial Sequence: Synthetic oligonucleotide"
acaaacacagtcagaaacttc

SEQ ID NO: 40581 - DNA, 21 bp, Artificial Sequence
  source: /note="Description of Artificial Sequence: Synthetic oligonucleotide"
acaaacgtcatgaaagcagga

SEQ ID NO: 40582 - DNA, 21 bp, Artificial Sequence
  source: /note="Description of Artificial Sequence: Synthetic oligonucleotide"
acaaactacaacgtcggaagc

SEQ ID NO: 40583 - DNA, 21 bp, Artificial Sequence
  source: /note="Description of Artificial Sequence: Synthetic oligonucleotide"
acaaactacgtcctcgcacca

SEQ ID NO: 40584 - DNA, 21 bp, Artificial Sequence
  source: /note="Description of Artificial Sequence: Synthetic oligonucleotide"
acaccagcattcaaaatccaa

SEQ ID NO: 40585 - DNA, 21 bp, Artificial Sequence
  source: /note="Description of Artificial Sequence: Synthetic oligonucleotide"
acaccagcaatcgtcccaaca

SEQ ID NO: 40586 - DNA, 21 bp, Artificial Sequence
  source: /note="Description of Artificial Sequence: Synthetic oligonucleotide"
acaccagcactcaacagacca

SEQ ID NO: 40587 - DNA, 21 bp, Artificial Sequence
  source: /note="Description of Artificial Sequence: Synthetic oligonucleotide"
acaccagcaaacgacccaaga

SEQ ID NO: 40588 - DNA, 21 bp, Artificial Sequence
  source: /note="Description of Artificial Sequence: Synthetic oligonucleotide"
acaccagcaccaaacagattc

SEQ ID NO: 40589 - DNA, 21 bp, Artificial Sequence
  source: /note="Description of Artificial Sequence: Synthetic oligonucleotide"
acaccagcaagcccaagcgac

SEQ ID NO: 40590 - DNA, 21 bp, Artificial Sequence
  source: /note="Description of Artificial Sequence: Synthetic oligonucleotide"
acaccagcaacactcccaagc

SEQ ID NO: 40591 - DNA, 21 bp, Artificial Sequence
  source: /note="Description of Artificial Sequence: Synthetic oligonucleotide"
acaccagcagtcgaaaaactc

SEQ ID NO: 40592 - DNA, 21 bp, Artificial Sequence
  source: /note="Description of Artificial Sequence: Synthetic oligonucleotide"
acaccagcatacggaagaatc

SEQ ID NO: 40593 - DNA, 21 bp, Artificial Sequence
  source: /note="Description of Artificial Sequence: Synthetic oligonucleotide"
acaccagacatgccattcaca

SEQ ID NO: 40594 - DNA, 21 bp, Artificial Sequence
  source: /note="Description of Artificial Sequence: Synthetic oligonucleotide"
acaccagaccaatacgaattc

SEQ ID NO: 40595 - DNA, 21 bp, Artificial Sequence
  source: /note="Description of Artificial Sequence: Synthetic oligonucleotide"
acaccagacagcatgacagca

SEQ ID NO: 40596 - DNA, 21 bp, Artificial Sequence
  source: /note="Description of Artificial Sequence: Synthetic oligonucleotide"
acaccagaaatgaaaagcaac

SEQ ID NO: 40597 - DNA, 21 bp, Artificial Sequence
  source: /note="Description of Artificial Sequence: Synthetic oligonucleotide"
acaccagaaagagcaatgagc

SEQ ID NO: 40598 - DNA, 21 bp, Artificial Sequence
  source: /note="Description of Artificial Sequence: Synthetic oligonucleotide"
acaccagaaacaaacagacca

SEQ ID NO: 40599 - DNA, 21 bp, Artificial Sequence
  source: /note="Description of Artificial Sequence: Synthetic oligonucleotide"
acaccaggaggagcaagacca

SEQ ID NO: 40600 - DNA, 21 bp, Artificial Sequence
  source: /note="Description of Artificial Sequence: Synthetic oligonucleotide"
acaccaggacacatggacagc

SEQ ID NO: 40601 - DNA, 21 bp, Artificial Sequence
  source: /note="Description of Artificial Sequence: Synthetic oligonucleotide"
acaccaggaatcccaagatgc

SEQ ID NO: 40602 - DNA, 21 bp, Artificial Sequence
  source: /note="Description of Artificial Sequence: Synthetic oligonucleotide"
acaccaggaagacaattccca

SEQ ID NO: 40603 - DNA, 21 bp, Artificial Sequence
  source: /note="Description of Artificial Sequence: Synthetic oligonucleotide"
acaccaggaacaatcaacgga

SEQ ID NO: 40604 - DNA, 21 bp, Artificial Sequence
  source: /note="Description of Artificial Sequence: Synthetic oligonucleotide"
acaccacacggagtcagccca

SEQ ID NO: 40605 - DNA, 21 bp, Artificial Sequence
  source: /note="Description of Artificial Sequence: Synthetic oligonucleotide"
acaccacacctcgacggacac

SEQ ID NO: 40606 - DNA, 21 bp, Artificial Sequence
  source: /note="Description of Artificial Sequence: Synthetic oligonucleotide"
acaccacacacaggaaaccaa

SEQ ID NO: 40607 - DNA, 21 bp, Artificial Sequence
  source: /note="Description of Artificial Sequence: Synthetic oligonucleotide"
acaccacacacactcgaagtc

SEQ ID NO: 40608 - DNA, 21 bp, Artificial Sequence
  source: /note="Description of Artificial Sequence: Synthetic oligonucleotide"
acaccaatcggactcccaagc

SEQ ID NO: 40609 - DNA, 21 bp, Artificial Sequence
  source: /note="Description of Artificial Sequence: Synthetic oligonucleotide"
acaccaatcagaaacatccca

SEQ ID NO: 40610 - DNA, 21 bp, Artificial Sequence
  source: /note="Description of Artificial Sequence: Synthetic oligonucleotide"
acaccaatcagcatgccaagc

SEQ ID NO: 40611 - DNA, 21 bp, Artificial Sequence
  source: /note="Description of Artificial Sequence: Synthetic oligonucleotide"
acaccaatcgtccacatcaac

SEQ ID NO: 40612 - DNA, 21 bp, Artificial Sequence
  source: /note="Description of Artificial Sequence: Synthetic oligonucleotide"
acaccaatcgtccacccaaga

SEQ ID NO: 40613 - DNA, 21 bp, Artificial Sequence
  source: /note="Description of Artificial Sequence: Synthetic oligonucleotide"
acaccaatcgtcaaaccagac

SEQ ID NO: 40614 - DNA, 21 bp, Artificial Sequence
  source: /note="Description of Artificial Sequence: Synthetic oligonucleotide"
acaccaaaagacgcagaagtc

SEQ ID NO: 40615 - DNA, 21 bp, Artificial Sequence
  source: /note="Description of Artificial Sequence: Synthetic oligonucleotide"
acaccaaaactcagcgaacaa

SEQ ID NO: 40616 - DNA, 21 bp, Artificial Sequence
  source: /note="Description of Artificial Sequence: Synthetic oligonucleotide"
acaccaaaaaacacactcgca

SEQ ID NO: 40617 - DNA, 21 bp, Artificial Sequence
  source: /note="Description of Artificial Sequence: Synthetic oligonucleotide"
acaccaaaaagcgcaagcgga

SEQ ID NO: 40618 - DNA, 21 bp, Artificial Sequence
  source: /note="Description of Artificial Sequence: Synthetic oligonucleotide"
acaccactcggaggaagcagc

SEQ ID NO: 40619 - DNA, 21 bp, Artificial Sequence
  source: /note="Description of Artificial Sequence: Synthetic oligonucleotide"
acaccactccacagcccagga

SEQ ID NO: 40620 - DNA, 21 bp, Artificial Sequence
  source: /note="Description of Artificial Sequence: Synthetic oligonucleotide"
acaccactccacagcacaaca

SEQ ID NO: 40621 - DNA, 21 bp, Artificial Sequence
  source: /note="Description of Artificial Sequence: Synthetic oligonucleotide"
acaccactcctctgcggaaaa

SEQ ID NO: 40622 - DNA, 21 bp, Artificial Sequence
  source: /note="Description of Artificial Sequence: Synthetic oligonucleotide"
acaccactcctcagccacagc

SEQ ID NO: 40623 - DNA, 21 bp, Artificial Sequence
  source: /note="Description of Artificial Sequence: Synthetic oligonucleotide"
acaccactccaaacaacagtc

SEQ ID NO: 40624 - DNA, 21 bp, Artificial Sequence
  source: /note="Description of Artificial Sequence: Synthetic oligonucleotide"
acaccactcagaagcagcaac

SEQ ID NO: 40625 - DNA, 21 bp, Artificial Sequence
  source: /note="Description of Artificial Sequence: Synthetic oligonucleotide"
acaccactcagcgcaatccaa

SEQ ID NO: 40626 - DNA, 21 bp, Artificial Sequence
  source: /note="Description of Artificial Sequence: Synthetic oligonucleotide"
acaccactcacaaacatcgca

SEQ ID NO: 40627 - DNA, 21 bp, Artificial Sequence
  source: /note="Description of Artificial Sequence: Synthetic oligonucleotide"
acaccactcacaacagcagga

SEQ ID NO: 40628 - DNA, 21 bp, Artificial Sequence
  source: /note="Description of Artificial Sequence: Synthetic oligonucleotide"
acaccaatggcagtcgaaagc

SEQ ID NO: 40629 - DNA, 21 bp, Artificial Sequence
  source: /note="Description of Artificial Sequence: Synthetic oligonucleotide"
acaccaatggaaatgatccca

SEQ ID NO: 40630 - DNA, 21 bp, Artificial Sequence
  source: /note="Description of Artificial Sequence: Synthetic oligonucleotide"
acaccaatgggaagcggatgg

SEQ ID NO: 40631 - DNA, 21 bp, Artificial Sequence
  source: /note="Description of Artificial Sequence: Synthetic oligonucleotide"
acaccaatgcaagtcccagca

SEQ ID NO: 40632 - DNA, 21 bp, Artificial Sequence
  source: /note="Description of Artificial Sequence: Synthetic oligonucleotide"
acaccaaacatgctcagcgca

SEQ ID NO: 40633 - DNA, 21 bp, Artificial Sequence
  source: /note="Description of Artificial Sequence: Synthetic oligonucleotide"
acaccaaacatggtcacagga

SEQ ID NO: 40634 - DNA, 21 bp, Artificial Sequence
  source: /note="Description of Artificial Sequence: Synthetic oligonucleotide"
acaccaaacagcagaacagtc

SEQ ID NO: 40635 - DNA, 21 bp, Artificial Sequence
  source: /note="Description of Artificial Sequence: Synthetic oligonucleotide"
acaccaaacgtcacatacaga

SEQ ID NO: 40636 - DNA, 21 bp, Artificial Sequence
  source: /note="Description of Artificial Sequence: Synthetic oligonucleotide"
acaccaaactactaccacgaa

SEQ ID NO: 40637 - DNA, 21 bp, Artificial Sequence
  source: /note="Description of Artificial Sequence: Synthetic oligonucleotide"
acaccaccagacggaacaaga

SEQ ID NO: 40638 - DNA, 21 bp, Artificial Sequence
  source: /note="Description of Artificial Sequence: Synthetic oligonucleotide"
acaccaccagaccaaagcaga

SEQ ID NO: 40639 - DNA, 21 bp, Artificial Sequence
  source: /note="Description of Artificial Sequence: Synthetic oligonucleotide"
acaccaccaggagaaatgaga

SEQ ID NO: 40640 - DNA, 21 bp, Artificial Sequence
  source: /note="Description of Artificial Sequence: Synthetic oligonucleotide"
acaccaccactcaaagcaagc

SEQ ID NO: 40641 - DNA, 21 bp, Artificial Sequence
  source: /note="Description of Artificial Sequence: Synthetic oligonucleotide"
acaccaccaccaccaacatgg

SEQ ID NO: 40642 - DNA, 21 bp, Artificial Sequence
  source: /note="Description of Artificial Sequence: Synthetic oligonucleotide"
acaccaccaagaggaatccca

SEQ ID NO: 40643 - DNA, 21 bp, Artificial Sequence
  source: /note="Description of Artificial Sequence: Synthetic oligonucleotide"
acaccaccaagaacagtcgtc

SEQ ID NO: 40644 - DNA, 21 bp, Artificial Sequence
  source: /note="Description of Artificial Sequence: Synthetic oligonucleotide"
acaccaccaagcagcgaatgg

SEQ ID NO: 40645 - DNA, 21 bp, Artificial Sequence
  source: /note="Description of Artificial Sequence: Synthetic oligonucleotide"
acaccaccaacagcaacaaga

SEQ ID NO: 40646 - DNA, 21 bp, Artificial Sequence
  source: /note="Description of Artificial Sequence: Synthetic oligonucleotide"
acaccaccaacactcatggaa

SEQ ID NO: 40647 - DNA, 21 bp, Artificial Sequence
  source: /note="Description of Artificial Sequence: Synthetic oligonucleotide"
acaccaccatacgtcgcacaa

SEQ ID NO: 40648 - DNA, 21 bp, Artificial Sequence
  source: /note="Description of Artificial Sequence: Synthetic oligonucleotide"
acaccacaaggagacatcgca

SEQ ID NO: 40649 - DNA, 21 bp, Artificial Sequence
  source: /note="Description of Artificial Sequence: Synthetic oligonucleotide"
acaccacaacacatgggacca

SEQ ID NO: 40650 - DNA, 21 bp, Artificial Sequence
  source: /note="Description of Artificial Sequence: Synthetic oligonucleotide"
acaccacaacacatgagagga

SEQ ID NO: 40651 - DNA, 21 bp, Artificial Sequence
  source: /note="Description of Artificial Sequence: Synthetic oligonucleotide"
acaccacaaatgccattccca

SEQ ID NO: 40652 - DNA, 21 bp, Artificial Sequence
  source: /note="Description of Artificial Sequence: Synthetic oligonucleotide"
acaccacaaaacatcatggac

SEQ ID NO: 40653 - DNA, 21 bp, Artificial Sequence
  source: /note="Description of Artificial Sequence: Synthetic oligonucleotide"
acaccacaaagagcaggaatc

SEQ ID NO: 40654 - DNA, 21 bp, Artificial Sequence
  source: /note="Description of Artificial Sequence: Synthetic oligonucleotide"
acaccaagagcagaacacaca

SEQ ID NO: 40655 - DNA, 21 bp, Artificial Sequence
  source: /note="Description of Artificial Sequence: Synthetic oligonucleotide"
acaccaagaggacaaagcctc

SEQ ID NO: 40656 - DNA, 21 bp, Artificial Sequence
  source: /note="Description of Artificial Sequence: Synthetic oligonucleotide"
acaccaagaggaagcctcgac

SEQ ID NO: 40657 - DNA, 21 bp, Artificial Sequence
  source: /note="Description of Artificial Sequence: Synthetic oligonucleotide"
acaccaagactcacagtcgaa

SEQ ID NO: 40658 - DNA, 21 bp, Artificial Sequence
  source: /note="Description of Artificial Sequence: Synthetic oligonucleotide"
acaccaagaccaacatacaca

SEQ ID NO: 40659 - DNA, 21 bp, Artificial Sequence
  source: /note="Description of Artificial Sequence: Synthetic oligonucleotide"
acaccaagaacaccaagcagc

SEQ ID NO: 40660 - DNA, 21 bp, Artificial Sequence
  source: /note="Description of Artificial Sequence: Synthetic oligonucleotide"
acaccaagcgcagcaatgatc

SEQ ID NO: 40661 - DNA, 21 bp, Artificial Sequence
  source: /note="Description of Artificial Sequence: Synthetic oligonucleotide"
acaccaagcgcaagcagactc

SEQ ID NO: 40662 - DNA, 21 bp, Artificial Sequence
  source: /note="Description of Artificial Sequence: Synthetic oligonucleotide"
acaccaagccacctcatgagc

SEQ ID NO: 40663 - DNA, 21 bp, Artificial Sequence
  source: /note="Description of Artificial Sequence: Synthetic oligonucleotide"
acaccaagcaaaggactcgtc

SEQ ID NO: 40664 - DNA, 21 bp, Artificial Sequence
  source: /note="Description of Artificial Sequence: Synthetic oligonucleotide"
acaccaagcaacgacatcagc

SEQ ID NO: 40665 - DNA, 21 bp, Artificial Sequence
  source: /note="Description of Artificial Sequence: Synthetic oligonucleotide"
acaccaagcaaccaaagcagc

SEQ ID NO: 40666 - DNA, 21 bp, Artificial Sequence
  source: /note="Description of Artificial Sequence: Synthetic oligonucleotide"
acaccaagcccaggagacgca

SEQ ID NO: 40667 - DNA, 21 bp, Artificial Sequence
  source: /note="Description of Artificial Sequence: Synthetic oligonucleotide"
acaccaagcccaccaggagtc

SEQ ID NO: 40668 - DNA, 21 bp, Artificial Sequence
  source: /note="Description of Artificial Sequence: Synthetic oligonucleotide"
acaccaagcagcgcaggaatc

SEQ ID NO: 40669 - DNA, 21 bp, Artificial Sequence
  source: /note="Description of Artificial Sequence: Synthetic oligonucleotide"
acaccaagcagcggaagcaga

SEQ ID NO: 40670 - DNA, 21 bp, Artificial Sequence
  source: /note="Description of Artificial Sequence: Synthetic oligonucleotide"
acaccaagcagcatgcaccca

SEQ ID NO: 40671 - DNA, 21 bp, Artificial Sequence
  source: /note="Description of Artificial Sequence: Synthetic oligonucleotide"
acaccaagcagcacacaactc

SEQ ID NO: 40672 - DNA, 21 bp, Artificial Sequence
  source: /note="Description of Artificial Sequence: Synthetic oligonucleotide"
acaccaagcgtcgacgcatgc

SEQ ID NO: 40673 - DNA, 21 bp, Artificial Sequence
  source: /note="Description of Artificial Sequence: Synthetic oligonucleotide"
acaccaagcgtcacactcctc

SEQ ID NO: 40674 - DNA, 21 bp, Artificial Sequence
  source: /note="Description of Artificial Sequence: Synthetic oligonucleotide"
acaccaagctacgtcatggca

SEQ ID NO: 40675 - DNA, 21 bp, Artificial Sequence
  source: /note="Description of Artificial Sequence: Synthetic oligonucleotide"
acaccaacagcaagaaaccca

SEQ ID NO: 40676 - DNA, 21 bp, Artificial Sequence
  source: /note="Description of Artificial Sequence: Synthetic oligonucleotide"
acaccaacagaaacaaaatac

SEQ ID NO: 40677 - DNA, 21 bp, Artificial Sequence
  source: /note="Description of Artificial Sequence: Synthetic oligonucleotide"
acaccaacaggaagagacttc

SEQ ID NO: 40678 - DNA, 21 bp, Artificial Sequence
  source: /note="Description of Artificial Sequence: Synthetic oligonucleotide"
acaccaacactcaaaagcaac

SEQ ID NO: 40679 - DNA, 21 bp, Artificial Sequence
  source: /note="Description of Artificial Sequence: Synthetic oligonucleotide"
acaccaacaccagcattcaga

SEQ ID NO: 40680 - DNA, 21 bp, Artificial Sequence
  source: /note="Description of Artificial Sequence: Synthetic oligonucleotide"
acaccaacaagaccaagcgca

SEQ ID NO: 40681 - DNA, 21 bp, Artificial Sequence
  source: /note="Description of Artificial Sequence: Synthetic oligonucleotide"
acaccaacaagcagcgaatgg

SEQ ID NO: 40682 - DNA, 21 bp, Artificial Sequence
  source: /note="Description of Artificial Sequence: Synthetic oligonucleotide"
acaccaacaacaagcaacgaa

SEQ ID NO: 40683 - DNA, 21 bp, Artificial Sequence
  source: /note="Description of Artificial Sequence: Synthetic oligonucleotide"
acaccaacagtcccaagagac

SEQ ID NO: 40684 - DNA, 21 bp, Artificial Sequence
  source: /note="Description of Artificial Sequence: Synthetic oligonucleotide"
acaccagtcctcaactacgga

SEQ ID NO: 40685 - DNA, 21 bp, Artificial Sequence
  source: /note="Description of Artificial Sequence: Synthetic oligonucleotide"
acaccagtcctcagcagcctc

SEQ ID NO: 40686 - DNA, 21 bp, Artificial Sequence
  source: /note="Description of Artificial Sequence: Synthetic oligonucleotide"
acaccagtccaagcagtcgca

SEQ ID NO: 40687 - DNA, 21 bp, Artificial Sequence
  source: /note="Description of Artificial Sequence: Synthetic oligonucleotide"
acaccagtcacaatcaacatg

SEQ ID NO: 40688 - DNA, 21 bp, Artificial Sequence
  source: /note="Description of Artificial Sequence: Synthetic oligonucleotide"
acaccatacccagacacaagc

SEQ ID NO: 40689 - DNA, 21 bp, Artificial Sequence
  source: /note="Description of Artificial Sequence: Synthetic oligonucleotide"
acacaagcagcagcatacaga

SEQ ID NO: 40690 - DNA, 21 bp, Artificial Sequence
  source: /note="Description of Artificial Sequence: Synthetic oligonucleotide"
acacaagcaggattcagcagc

SEQ ID NO: 40691 - DNA, 21 bp, Artificial Sequence
  source: /note="Description of Artificial Sequence: Synthetic oligonucleotide"
acacaagcacacttcgcagga

SEQ ID NO: 40692 - DNA, 21 bp, Artificial Sequence
  source: /note="Description of Artificial Sequence: Synthetic oligonucleotide"
acacaagacagcttcagacac

SEQ ID NO: 40693 - DNA, 21 bp, Artificial Sequence
  source: /note="Description of Artificial Sequence: Synthetic oligonucleotide"
acacaagaactcccaagaagc

SEQ ID NO: 40694 - DNA, 21 bp, Artificial Sequence
  source: /note="Description of Artificial Sequence: Synthetic oligonucleotide"
acacaagaaaacgtcgaaaga

SEQ ID NO: 40695 - DNA, 21 bp, Artificial Sequence
  source: /note="Description of Artificial Sequence: Synthetic oligonucleotide"
acacaagaagtcgaaagagaa

SEQ ID NO: 40696 - DNA, 21 bp, Artificial Sequence
  source: /note="Description of Artificial Sequence: Synthetic oligonucleotide"
acacaattcccagcactcgga

SEQ ID NO: 40697 - DNA, 21 bp, Artificial Sequence
  source: /note="Description of Artificial Sequence: Synthetic oligonucleotide"
acacaattcacacacaaagca

SEQ ID NO: 40698 - DNA, 21 bp, Artificial Sequence
  source: /note="Description of Artificial Sequence: Synthetic oligonucleotide"
acacaaggagacgtcagcagc

SEQ ID NO: 40699 - DNA, 21 bp, Artificial Sequence
  source: /note="Description of Artificial Sequence: Synthetic oligonucleotide"
acacaaggactcgacgtcgaa

SEQ ID NO: 40700 - DNA, 21 bp, Artificial Sequence
  source: /note="Description of Artificial Sequence: Synthetic oligonucleotide"
acacaaggacaagcaaaccca

SEQ ID NO: 40701 - DNA, 21 bp, Artificial Sequence
  source: /note="Description of Artificial Sequence: Synthetic oligonucleotide"
acacaaggaagagactacgtc

SEQ ID NO: 40702 - DNA, 21 bp, Artificial Sequence
  source: /note="Description of Artificial Sequence: Synthetic oligonucleotide"
acacaaggaacaagagcatgg

SEQ ID NO: 40703 - DNA, 21 bp, Artificial Sequence
  source: /note="Description of Artificial Sequence: Synthetic oligonucleotide"
acacaacacgcaggaggattc

SEQ ID NO: 40704 - DNA, 21 bp, Artificial Sequence
  source: /note="Description of Artificial Sequence: Synthetic oligonucleotide"
acacaaatcagcagcatgagc

SEQ ID NO: 40705 - DNA, 21 bp, Artificial Sequence
  source: /note="Description of Artificial Sequence: Synthetic oligonucleotide"
acacaaatcacagtcgacgaa

SEQ ID NO: 40706 - DNA, 21 bp, Artificial Sequence
  source: /note="Description of Artificial Sequence: Synthetic oligonucleotide"
acacaaaaactcagcatgagc

SEQ ID NO: 40707 - DNA, 21 bp, Artificial Sequence
  source: /note="Description of Artificial Sequence: Synthetic oligonucleotide"
acacaaaaagtcagcgaccca

SEQ ID NO: 40708 - DNA, 21 bp, Artificial Sequence
  source: /note="Description of Artificial Sequence: Synthetic oligonucleotide"
acacaactcaacgtcagcaga

SEQ ID NO: 40709 - DNA, 21 bp, Artificial Sequence
  source: /note="Description of Artificial Sequence: Synthetic oligonucleotide"
acacaactcagcgtcaaccca

SEQ ID NO: 40710 - DNA, 21 bp, Artificial Sequence
  source: /note="Description of Artificial Sequence: Synthetic oligonucleotide"
acacaaatgacaaaagcaagc

SEQ ID NO: 40711 - DNA, 21 bp, Artificial Sequence
  source: /note="Description of Artificial Sequence: Synthetic oligonucleotide"
acacaaaacgaaccacacctc

SEQ ID NO: 40712 - DNA, 21 bp, Artificial Sequence
  source: /note="Description of Artificial Sequence: Synthetic oligonucleotide"
acacaaaacctctgcgacaga

SEQ ID NO: 40713 - DNA, 21 bp, Artificial Sequence
  source: /note="Description of Artificial Sequence: Synthetic oligonucleotide"
acacaaccaccactcagccaa

SEQ ID NO: 40714 - DNA, 21 bp, Artificial Sequence
  source: /note="Description of Artificial Sequence: Synthetic oligonucleotide"
acacaaccaagcgcagcagca

SEQ ID NO: 40715 - DNA, 21 bp, Artificial Sequence
  source: /note="Description of Artificial Sequence: Synthetic oligonucleotide"
acacaaccaagcctccaagca

SEQ ID NO: 40716 - DNA, 21 bp, Artificial Sequence
  source: /note="Description of Artificial Sequence: Synthetic oligonucleotide"
acacaaccaagcagaccactc

SEQ ID NO: 40717 - DNA, 21 bp, Artificial Sequence
  source: /note="Description of Artificial Sequence: Synthetic oligonucleotide"
acacaaccaacaggatgcgaa

SEQ ID NO: 40718 - DNA, 21 bp, Artificial Sequence
  source: /note="Description of Artificial Sequence: Synthetic oligonucleotide"
acacaaccatacggacacgca

SEQ ID NO: 40719 - DNA, 21 bp, Artificial Sequence
  source: /note="Description of Artificial Sequence: Synthetic oligonucleotide"
acacaacaaagcacaatcagc

SEQ ID NO: 40720 - DNA, 21 bp, Artificial Sequence
  source: /note="Description of Artificial Sequence: Synthetic oligonucleotide"
acacaacaaacaccaagagga

SEQ ID NO: 40721 - DNA, 21 bp, Artificial Sequence
  source: /note="Description of Artificial Sequence: Synthetic oligonucleotide"
acacaacaaacaagcgcatac

SEQ ID NO: 40722 - DNA, 21 bp, Artificial Sequence
  source: /note="Description of Artificial Sequence: Synthetic oligonucleotide"
acacaaagagaaacaaacagc

SEQ ID NO: 40723 - DNA, 21 bp, Artificial Sequence
  source: /note="Description of Artificial Sequence: Synthetic oligonucleotide"
acacaaagaggaagcgcagaa

SEQ ID NO: 40724 - DNA, 21 bp, Artificial Sequence
  source: /note="Description of Artificial Sequence: Synthetic oligonucleotide"
acacaaagaccaatcacagtc

SEQ ID NO: 40725 - DNA, 21 bp, Artificial Sequence
  source: /note="Description of Artificial Sequence: Synthetic oligonucleotide"
acacaaagagtcgcaagagac

SEQ ID NO: 40726 - DNA, 21 bp, Artificial Sequence
  source: /note="Description of Artificial Sequence: Synthetic oligonucleotide"
acacaaagcgcaatgagcgtc

SEQ ID NO: 40727 - DNA, 21 bp, Artificial Sequence
  source: /note="Description of Artificial Sequence: Synthetic oligonucleotide"
acacaaagcgaaacagtcctc

SEQ ID NO: 40728 - DNA, 21 bp, Artificial Sequence
  source: /note="Description of Artificial Sequence: Synthetic oligonucleotide"
acacaaagcttcggaagcgca

SEQ ID NO: 40729 - DNA, 21 bp, Artificial Sequence
  source: /note="Description of Artificial Sequence: Synthetic oligonucleotide"
acacaaagcctcgcaagcgaa

SEQ ID NO: 40730 - DNA, 21 bp, Artificial Sequence
  source: /note="Description of Artificial Sequence: Synthetic oligonucleotide"
acacaaagcctcatggacgac

SEQ ID NO: 40731 - DNA, 21 bp, Artificial Sequence
  source: /note="Description of Artificial Sequence: Synthetic oligonucleotide"
acacaaagcagagacatgagc

SEQ ID NO: 40732 - DNA, 21 bp, Artificial Sequence
  source: /note="Description of Artificial Sequence: Synthetic oligonucleotide"
acacaaagcagcgcactcagc

SEQ ID NO: 40733 - DNA, 21 bp, Artificial Sequence
  source: /note="Description of Artificial Sequence: Synthetic oligonucleotide"
acacaaagcagccaaagaatc

SEQ ID NO: 40734 - DNA, 21 bp, Artificial Sequence
  source: /note="Description of Artificial Sequence: Synthetic oligonucleotide"
acacaaagcagcacaggacca

SEQ ID NO: 40735 - DNA, 21 bp, Artificial Sequence
  source: /note="Description of Artificial Sequence: Synthetic oligonucleotide"
acacaaagcagcacacaacca

SEQ ID NO: 40736 - DNA, 21 bp, Artificial Sequence
  source: /note="Description of Artificial Sequence: Synthetic oligonucleotide"
acacaaacaagaccagtcgga

SEQ ID NO: 40737 - DNA, 21 bp, Artificial Sequence
  source: /note="Description of Artificial Sequence: Synthetic oligonucleotide"
acacaaacaacaatcatgcca

SEQ ID NO: 40738 - DNA, 21 bp, Artificial Sequence
  source: /note="Description of Artificial Sequence: Synthetic oligonucleotide"
acacaaacaacaagcctctac

SEQ ID NO: 40739 - DNA, 21 bp, Artificial Sequence
  source: /note="Description of Artificial Sequence: Synthetic oligonucleotide"
acacaaacaacaagcccagtc

SEQ ID NO: 40740 - DNA, 21 bp, Artificial Sequence
  source: /note="Description of Artificial Sequence: Synthetic oligonucleotide"
acacaagtcgcactcagacca

SEQ ID NO: 40741 - DNA, 21 bp, Artificial Sequence
  source: /note="Description of Artificial Sequence: Synthetic oligonucleotide"
acacaagtcgcaacataccaa

SEQ ID NO: 40742 - DNA, 21 bp, Artificial Sequence
  source: /note="Description of Artificial Sequence: Synthetic oligonucleotide"
acacaatggctcgcacaagga

SEQ ID NO: 40743 - DNA, 21 bp, Artificial Sequence
  source: /note="Description of Artificial Sequence: Synthetic oligonucleotide"
acaagagcagcactcggaaca

SEQ ID NO: 40744 - DNA, 21 bp, Artificial Sequence
  source: /note="Description of Artificial Sequence: Synthetic oligonucleotide"
acaagagcactccaagcagga

SEQ ID NO: 40745 - DNA, 21 bp, Artificial Sequence
  source: /note="Description of Artificial Sequence: Synthetic oligonucleotide"
acaagagcaaacgcaacaaac

SEQ ID NO: 40746 - DNA, 21 bp, Artificial Sequence
  source: /note="Description of Artificial Sequence: Synthetic oligonucleotide"
acaagagcaccagcaacaatg

SEQ ID NO: 40747 - DNA, 21 bp, Artificial Sequence
  source: /note="Description of Artificial Sequence: Synthetic oligonucleotide"
acaagagcaagcacagcaaac

SEQ ID NO: 40748 - DNA, 21 bp, Artificial Sequence
  source: /note="Description of Artificial Sequence: Synthetic oligonucleotide"
acaagagcaacaggagacgca

SEQ ID NO: 40749 - DNA, 21 bp, Artificial Sequence
  source: /note="Description of Artificial Sequence: Synthetic oligonucleotide"
acaagagcagtcgacggaaga

SEQ ID NO: 40750 - DNA, 21 bp, Artificial Sequence
  source: /note="Description of Artificial Sequence: Synthetic oligonucleotide"
acaagagcagtcggaggacaa

SEQ ID NO: 40751 - DNA, 21 bp, Artificial Sequence
  source: /note="Description of Artificial Sequence: Synthetic oligonucleotide"
acaagagacgaatgggcaaca

SEQ ID NO: 40752 - DNA, 21 bp, Artificial Sequence
  source: /note="Description of Artificial Sequence: Synthetic oligonucleotide"
acaagagacagaggaccaagc

SEQ ID NO: 40753 - DNA, 21 bp, Artificial Sequence
  source: /note="Description of Artificial Sequence: Synthetic oligonucleotide"
acaagagacacaagctacaca

SEQ ID NO: 40754 - DNA, 21 bp, Artificial Sequence
  source: /note="Description of Artificial Sequence: Synthetic oligonucleotide"
acaagagaaggattcatggtc

SEQ ID NO: 40755 - DNA, 21 bp, Artificial Sequence
  source: /note="Description of Artificial Sequence: Synthetic oligonucleotide"
acaagagaaatgggaccaagc

SEQ ID NO: 40756 - DNA, 21 bp, Artificial Sequence
  source: /note="Description of Artificial Sequence: Synthetic oligonucleotide"
acaagagaaacagtcccagca

SEQ ID NO: 40757 - DNA, 21 bp, Artificial Sequence
  source: /note="Description of Artificial Sequence: Synthetic oligonucleotide"
acaagattctgcagcagccca

SEQ ID NO: 40758 - DNA, 21 bp, Artificial Sequence
  source: /note="Description of Artificial Sequence: Synthetic oligonucleotide"
acaagattcgaaaaatacgac

SEQ ID NO: 40759 - DNA, 21 bp, Artificial Sequence
  source: /note="Description of Artificial Sequence: Synthetic oligonucleotide"
acaagattccaagtcgaagtc

SEQ ID NO: 40760 - DNA, 21 bp, Artificial Sequence
  source: /note="Description of Artificial Sequence: Synthetic oligonucleotide"
acaagaggaggagacggagtc

SEQ ID NO: 40761 - DNA, 21 bp, Artificial Sequence
  source: /note="Description of Artificial Sequence: Synthetic oligonucleotide"
acaagaggaacagacctcagc

SEQ ID NO: 40762 - DNA, 21 bp, Artificial Sequence
  source: /note="Description of Artificial Sequence: Synthetic oligonucleotide"
acaagaggaacaagcgtcagc

SEQ ID NO: 40763 - DNA, 21 bp, Artificial Sequence
  source: /note="Description of Artificial Sequence: Synthetic oligonucleotide"
acaagaggagtcatcaacgca

SEQ ID NO: 40764 - DNA, 21 bp, Artificial Sequence
  source: /note="Description of Artificial Sequence: Synthetic oligonucleotide"
acaagacacgacttcctcaac

SEQ ID NO: 40765 - DNA, 21 bp, Artificial Sequence
  source: /note="Description of Artificial Sequence: Synthetic oligonucleotide"
acaagaatcggaccaagcgaa

SEQ ID NO: 40766 - DNA, 21 bp, Artificial Sequence
  source: /note="Description of Artificial Sequence: Synthetic oligonucleotide"
acaagaatccacgcactccca

SEQ ID NO: 40767 - DNA, 21 bp, Artificial Sequence
  source: /note="Description of Artificial Sequence: Synthetic oligonucleotide"
acaagaatcagcctcagcgga

SEQ ID NO: 40768 - DNA, 21 bp, Artificial Sequence
  source: /note="Description of Artificial Sequence: Synthetic oligonucleotide"
acaagaaaactcgcagtcgac

SEQ ID NO: 40769 - DNA, 21 bp, Artificial Sequence
  source: /note="Description of Artificial Sequence: Synthetic oligonucleotide"
acaagactcaacagcatcgac

SEQ ID NO: 40770 - DNA, 21 bp, Artificial Sequence
  source: /note="Description of Artificial Sequence: Synthetic oligonucleotide"
acaagactcccaacaagcctc

SEQ ID NO: 40771 - DNA, 21 bp, Artificial Sequence
  source: /note="Description of Artificial Sequence: Synthetic oligonucleotide"
acaagactccaaacaagcgca

SEQ ID NO: 40772 - DNA, 21 bp, Artificial Sequence
  source: /note="Description of Artificial Sequence: Synthetic oligonucleotide"
acaagactcagcgaaaacaca

SEQ ID NO: 40773 - DNA, 21 bp, Artificial Sequence
  source: /note="Description of Artificial Sequence: Synthetic oligonucleotide"
acaagactcagcagcagcgtc

SEQ ID NO: 40774 - DNA, 21 bp, Artificial Sequence
  source: /note="Description of Artificial Sequence: Synthetic oligonucleotide"
acaagaatggcaagcgacgga

SEQ ID NO: 40775 - DNA, 21 bp, Artificial Sequence
  source: /note="Description of Artificial Sequence: Synthetic oligonucleotide"
acaagaatgccaagcggagtc

SEQ ID NO: 40776 - DNA, 21 bp, Artificial Sequence
  source: /note="Description of Artificial Sequence: Synthetic oligonucleotide"
acaagaatgccagtcatcagc

SEQ ID NO: 40777 - DNA, 21 bp, Artificial Sequence
  source: /note="Description of Artificial Sequence: Synthetic oligonucleotide"
acaagaaacgaatacagcttc

SEQ ID NO: 40778 - DNA, 21 bp, Artificial Sequence
  source: /note="Description of Artificial Sequence: Synthetic oligonucleotide"
acaagaaacctcgacagcgtc

SEQ ID NO: 40779 - DNA, 21 bp, Artificial Sequence
  source: /note="Description of Artificial Sequence: Synthetic oligonucleotide"
acaagaaacatgagcgacaca

SEQ ID NO: 40780 - DNA, 21 bp, Artificial Sequence
  source: /note="Description of Artificial Sequence: Synthetic oligonucleotide"
acaagaaacaaccacgtcaca

SEQ ID NO: 40781 - DNA, 21 bp, Artificial Sequence
  source: /note="Description of Artificial Sequence: Synthetic oligonucleotide"
acaagaaacccagaaccaaaa

SEQ ID NO: 40782 - DNA, 21 bp, Artificial Sequence
  source: /note="Description of Artificial Sequence: Synthetic oligonucleotide"
acaagaaacccagaaagcaca

SEQ ID NO: 40783 - DNA, 21 bp, Artificial Sequence
  source: /note="Description of Artificial Sequence: Synthetic oligonucleotide"
acaagaaacccaggaacaaca

SEQ ID NO: 40784 - DNA, 21 bp, Artificial Sequence
  source: /note="Description of Artificial Sequence: Synthetic oligonucleotide"
acaagaaaccaactcagagac

SEQ ID NO: 40785 - DNA, 21 bp, Artificial Sequence
  source: /note="Description of Artificial Sequence: Synthetic oligonucleotide"
acaagaaacagcggaatggca

SEQ ID NO: 40786 - DNA, 21 bp, Artificial Sequence
  source: /note="Description of Artificial Sequence: Synthetic oligonucleotide"
acaagaaacacaacagaagca

SEQ ID NO: 40787 - DNA, 21 bp, Artificial Sequence
  source: /note="Description of Artificial Sequence: Synthetic oligonucleotide"
acaagaccagcaccaatggca

SEQ ID NO: 40788 - DNA, 21 bp, Artificial Sequence
  source: /note="Description of Artificial Sequence: Synthetic oligonucleotide"
acaagaccagacagcctccca

SEQ ID NO: 40789 - DNA, 21 bp, Artificial Sequence
  source: /note="Description of Artificial Sequence: Synthetic oligonucleotide"
acaagaccaggagtcgacaca

SEQ ID NO: 40790 - DNA, 21 bp, Artificial Sequence
  source: /note="Description of Artificial Sequence: Synthetic oligonucleotide"
acaagaccactcgcaatcgca

SEQ ID NO: 40791 - DNA, 21 bp, Artificial Sequence
  source: /note="Description of Artificial Sequence: Synthetic oligonucleotide"
acaagaccactcccaagcaac

SEQ ID NO: 40792 - DNA, 21 bp, Artificial Sequence
  source: /note="Description of Artificial Sequence: Synthetic oligonucleotide"
acaagaccactcagcagcgga

SEQ ID NO: 40793 - DNA, 21 bp, Artificial Sequence
  source: /note="Description of Artificial Sequence: Synthetic oligonucleotide"
acaagaccactcagcagccca

SEQ ID NO: 40794 - DNA, 21 bp, Artificial Sequence
  source: /note="Description of Artificial Sequence: Synthetic oligonucleotide"
acaagaccaatggaaagcgca

SEQ ID NO: 40795 - DNA, 21 bp, Artificial Sequence
  source: /note="Description of Artificial Sequence: Synthetic oligonucleotide"
acaagaccaaacctcccatac

SEQ ID NO: 40796 - DNA, 21 bp, Artificial Sequence
  source: /note="Description of Artificial Sequence: Synthetic oligonucleotide"
acaagaccaagcgaagcacaa

SEQ ID NO: 40797 - DNA, 21 bp, Artificial Sequence
  source: /note="Description of Artificial Sequence: Synthetic oligonucleotide"
acaagaccaagctacgaaatg

SEQ ID NO: 40798 - DNA, 21 bp, Artificial Sequence
  source: /note="Description of Artificial Sequence: Synthetic oligonucleotide"
acaagaccaacagcagacgac

SEQ ID NO: 40799 - DNA, 21 bp, Artificial Sequence
  source: /note="Description of Artificial Sequence: Synthetic oligonucleotide"
acaagaccaacaccactcctc

SEQ ID NO: 40800 - DNA, 21 bp, Artificial Sequence
  source: /note="Description of Artificial Sequence: Synthetic oligonucleotide"
acaagaccagtcggaacaagc

SEQ ID NO: 40801 - DNA, 21 bp, Artificial Sequence
  source: /note="Description of Artificial Sequence: Synthetic oligonucleotide"
acaagaccagtctacgcagac

SEQ ID NO: 40802 - DNA, 21 bp, Artificial Sequence
  source: /note="Description of Artificial Sequence: Synthetic oligonucleotide"
acaagacaagcaacaagcgaa

SEQ ID NO: 40803 - DNA, 21 bp, Artificial Sequence
  source: /note="Description of Artificial Sequence: Synthetic oligonucleotide"
acaagacaactcctcacagca

SEQ ID NO: 40804 - DNA, 21 bp, Artificial Sequence
  source: /note="Description of Artificial Sequence: Synthetic oligonucleotide"
acaagacaatacacaaacagc

SEQ ID NO: 40805 - DNA, 21 bp, Artificial Sequence
  source: /note="Description of Artificial Sequence: Synthetic oligonucleotide"
acaagaagaccagacatcgca

SEQ ID NO: 40806 - DNA, 21 bp, Artificial Sequence
  source: /note="Description of Artificial Sequence: Synthetic oligonucleotide"
acaagaagagtcccaagcgaa

SEQ ID NO: 40807 - DNA, 21 bp, Artificial Sequence
  source: /note="Description of Artificial Sequence: Synthetic oligonucleotide"
acaagaagcgcactcgaactc

SEQ ID NO: 40808 - DNA, 21 bp, Artificial Sequence
  source: /note="Description of Artificial Sequence: Synthetic oligonucleotide"
acaagaagcgcagtcggaagc

SEQ ID NO: 40809 - DNA, 21 bp, Artificial Sequence
  source: /note="Description of Artificial Sequence: Synthetic oligonucleotide"
acaagaagcttcgaaagcagc

SEQ ID NO: 40810 - DNA, 21 bp, Artificial Sequence
  source: /note="Description of Artificial Sequence: Synthetic oligonucleotide"
acaagaagcggactcatcgaa

SEQ ID NO: 40811 - DNA, 21 bp, Artificial Sequence
  source: /note="Description of Artificial Sequence: Synthetic oligonucleotide"
acaagaagcggaacagacctc

SEQ ID NO: 40812 - DNA, 21 bp, Artificial Sequence
  source: /note="Description of Artificial Sequence: Synthetic oligonucleotide"
acaagaagcatggtcacactc

SEQ ID NO: 40813 - DNA, 21 bp, Artificial Sequence
  source: /note="Description of Artificial Sequence: Synthetic oligonucleotide"
acaagaagcaacgaaacagtc

SEQ ID NO: 40814 - DNA, 21 bp, Artificial Sequence
  source: /note="Description of Artificial Sequence: Synthetic oligonucleotide"
acaagaagcaacggactcaca

SEQ ID NO: 40815 - DNA, 21 bp, Artificial Sequence
  source: /note="Description of Artificial Sequence: Synthetic oligonucleotide"
acaagaagcaacaacagcaca

SEQ ID NO: 40816 - DNA, 21 bp, Artificial Sequence
  source: /note="Description of Artificial Sequence: Synthetic oligonucleotide"
acaagaagcccaagcagctac

SEQ ID NO: 40817 - DNA, 21 bp, Artificial Sequence
  source: /note="Description of Artificial Sequence: Synthetic oligonucleotide"
acaagaagccaacacgaaagc

SEQ ID NO: 40818 - DNA, 21 bp, Artificial Sequence
  source: /note="Description of Artificial Sequence: Synthetic oligonucleotide"
acaagaagccaaagcccaatg

SEQ ID NO: 40819 - DNA, 21 bp, Artificial Sequence
  source: /note="Description of Artificial Sequence: Synthetic oligonucleotide"
acaagaagcagcctcacacca

SEQ ID NO: 40820 - DNA, 21 bp, Artificial Sequence
  source: /note="Description of Artificial Sequence: Synthetic oligonucleotide"
acaagaagcagcagcatcctc

SEQ ID NO: 40821 - DNA, 21 bp, Artificial Sequence
  source: /note="Description of Artificial Sequence: Synthetic oligonucleotide"
acaagaagcacagcaagccca

SEQ ID NO: 40822 - DNA, 21 bp, Artificial Sequence
  source: /note="Description of Artificial Sequence: Synthetic oligonucleotide"
acaagaagcacaccaatctac

SEQ ID NO: 40823 - DNA, 21 bp, Artificial Sequence
  source: /note="Description of Artificial Sequence: Synthetic oligonucleotide"
acaagaagcgtcgaactcctc

SEQ ID NO: 40824 - DNA, 21 bp, Artificial Sequence
  source: /note="Description of Artificial Sequence: Synthetic oligonucleotide"
acaagaacaatcacaccactc

SEQ ID NO: 40825 - DNA, 21 bp, Artificial Sequence
  source: /note="Description of Artificial Sequence: Synthetic oligonucleotide"
acaagaacactcacaagcagc

SEQ ID NO: 40826 - DNA, 21 bp, Artificial Sequence
  source: /note="Description of Artificial Sequence: Synthetic oligonucleotide"
acaagaacaatgagcatgagc

SEQ ID NO: 40827 - DNA, 21 bp, Artificial Sequence
  source: /note="Description of Artificial Sequence: Synthetic oligonucleotide"
acaagaacaaacagcatcatc

SEQ ID NO: 40828 - DNA, 21 bp, Artificial Sequence
  source: /note="Description of Artificial Sequence: Synthetic oligonucleotide"
acaagaacaagactcggagac

SEQ ID NO: 40829 - DNA, 21 bp, Artificial Sequence
  source: /note="Description of Artificial Sequence: Synthetic oligonucleotide"
acaagaacaagcgacttccca

SEQ ID NO: 40830 - DNA, 21 bp, Artificial Sequence
  source: /note="Description of Artificial Sequence: Synthetic oligonucleotide"
acaagaacaagccacgcactc

SEQ ID NO: 40831 - DNA, 21 bp, Artificial Sequence
  source: /note="Description of Artificial Sequence: Synthetic oligonucleotide"
acaagaacaagccaaccaagc

SEQ ID NO: 40832 - DNA, 21 bp, Artificial Sequence
  source: /note="Description of Artificial Sequence: Synthetic oligonucleotide"
acaagaacaagcacaggaagc

SEQ ID NO: 40833 - DNA, 21 bp, Artificial Sequence
  source: /note="Description of Artificial Sequence: Synthetic oligonucleotide"
acaagaacaacaggaagcatg

SEQ ID NO: 40834 - DNA, 21 bp, Artificial Sequence
  source: /note="Description of Artificial Sequence: Synthetic oligonucleotide"
acaagaacaacactcgaaagc

SEQ ID NO: 40835 - DNA, 21 bp, Artificial Sequence
  source: /note="Description of Artificial Sequence: Synthetic oligonucleotide"
acaagaacaacaacagtcaca

SEQ ID NO: 40836 - DNA, 21 bp, Artificial Sequence
  source: /note="Description of Artificial Sequence: Synthetic oligonucleotide"
acaagaacagtcgcaacatac

SEQ ID NO: 40837 - DNA, 21 bp, Artificial Sequence
  source: /note="Description of Artificial Sequence: Synthetic oligonucleotide"
acaagaacagtccaactcgga

SEQ ID NO: 40838 - DNA, 21 bp, Artificial Sequence
  source: /note="Description of Artificial Sequence: Synthetic oligonucleotide"
acaagagtccacggagtcagc

SEQ ID NO: 40839 - DNA, 21 bp, Artificial Sequence
  source: /note="Description of Artificial Sequence: Synthetic oligonucleotide"
acaagagtcatcatgaacgac

SEQ ID NO: 40840 - DNA, 21 bp, Artificial Sequence
  source: /note="Description of Artificial Sequence: Synthetic oligonucleotide"
acaagagtcagcagcatccca

SEQ ID NO: 40841 - DNA, 21 bp, Artificial Sequence
  source: /note="Description of Artificial Sequence: Synthetic oligonucleotide"
acaagagtcacagcaccactc

SEQ ID NO: 40842 - DNA, 21 bp, Artificial Sequence
  source: /note="Description of Artificial Sequence: Synthetic oligonucleotide"
acaagagtctacccagcagga

SEQ ID NO: 40843 - DNA, 21 bp, Artificial Sequence
  source: /note="Description of Artificial Sequence: Synthetic oligonucleotide"
acaagcgcaggactcaactac

SEQ ID NO: 40844 - DNA, 21 bp, Artificial Sequence
  source: /note="Description of Artificial Sequence: Synthetic oligonucleotide"
acaagcgcaggagtctacaaa

SEQ ID NO: 40845 - DNA, 21 bp, Artificial Sequence
  source: /note="Description of Artificial Sequence: Synthetic oligonucleotide"
acaagcgcaaaacacacaatg

SEQ ID NO: 40846 - DNA, 21 bp, Artificial Sequence
  source: /note="Description of Artificial Sequence: Synthetic oligonucleotide"
acaagcgcactcatcttcgaa

SEQ ID NO: 40847 - DNA, 21 bp, Artificial Sequence
  source: /note="Description of Artificial Sequence: Synthetic oligonucleotide"
acaagcgcacaaagcggacca

SEQ ID NO: 40848 - DNA, 21 bp, Artificial Sequence
  source: /note="Description of Artificial Sequence: Synthetic oligonucleotide"
acaagcgcaagaccattcctc

SEQ ID NO: 40849 - DNA, 21 bp, Artificial Sequence
  source: /note="Description of Artificial Sequence: Synthetic oligonucleotide"
acaagcgcaagaccagtcgga

SEQ ID NO: 40850 - DNA, 21 bp, Artificial Sequence
  source: /note="Description of Artificial Sequence: Synthetic oligonucleotide"
acaagcgcaagcatcccacca

SEQ ID NO: 40851 - DNA, 21 bp, Artificial Sequence
  source: /note="Description of Artificial Sequence: Synthetic oligonucleotide"
acaagcgcaagcagcacaaca

SEQ ID NO: 40852 - DNA, 21 bp, Artificial Sequence
  source: /note="Description of Artificial Sequence: Synthetic oligonucleotide"
acaagcgacctcccactcaac

SEQ ID NO: 40853 - DNA, 21 bp, Artificial Sequence
  source: /note="Description of Artificial Sequence: Synthetic oligonucleotide"
acaagcgacctcagaggaaga

SEQ ID NO: 40854 - DNA, 21 bp, Artificial Sequence
  source: /note="Description of Artificial Sequence: Synthetic oligonucleotide"
acaagcgacaacatgccacac

SEQ ID NO: 40855 - DNA, 21 bp, Artificial Sequence
  source: /note="Description of Artificial Sequence: Synthetic oligonucleotide"
acaagcgacccatgcatgagc

SEQ ID NO: 40856 - DNA, 21 bp, Artificial Sequence
  source: /note="Description of Artificial Sequence: Synthetic oligonucleotide"
acaagcgacagcgcagtcaca

SEQ ID NO: 40857 - DNA, 21 bp, Artificial Sequence
  source: /note="Description of Artificial Sequence: Synthetic oligonucleotide"
acaagcgacgtcctcctcaca

SEQ ID NO: 40858 - DNA, 21 bp, Artificial Sequence
  source: /note="Description of Artificial Sequence: Synthetic oligonucleotide"
acaagcgaaagcaaagcacac

SEQ ID NO: 40859 - DNA, 21 bp, Artificial Sequence
  source: /note="Description of Artificial Sequence: Synthetic oligonucleotide"
acaagcgaaagctggccaagc

SEQ ID NO: 40860 - DNA, 21 bp, Artificial Sequence
  source: /note="Description of Artificial Sequence: Synthetic oligonucleotide"
acaagcttcggaccaagcagc

SEQ ID NO: 40861 - DNA, 21 bp, Artificial Sequence
  source: /note="Description of Artificial Sequence: Synthetic oligonucleotide"
acaagcttcctcaaaacaagc

SEQ ID NO: 40862 - DNA, 21 bp, Artificial Sequence
  source: /note="Description of Artificial Sequence: Synthetic oligonucleotide"
acaagcttcccaagcagcgca

SEQ ID NO: 40863 - DNA, 21 bp, Artificial Sequence
  source: /note="Description of Artificial Sequence: Synthetic oligonucleotide"
acaagcttcagactcgacgaa

SEQ ID NO: 40864 - DNA, 21 bp, Artificial Sequence
  source: /note="Description of Artificial Sequence: Synthetic oligonucleotide"
acaagcttcagccaaagcaca

SEQ ID NO: 40865 - DNA, 21 bp, Artificial Sequence
  source: /note="Description of Artificial Sequence: Synthetic oligonucleotide"
acaagcttcagcagaggactc

SEQ ID NO: 40866 - DNA, 21 bp, Artificial Sequence
  source: /note="Description of Artificial Sequence: Synthetic oligonucleotide"
acaagcggacaccacatcctc

SEQ ID NO: 40867 - DNA, 21 bp, Artificial Sequence
  source: /note="Description of Artificial Sequence: Synthetic oligonucleotide"
acaagcggactcccagaagca

SEQ ID NO: 40868 - DNA, 21 bp, Artificial Sequence
  source: /note="Description of Artificial Sequence: Synthetic oligonucleotide"
acaagcggactcagcgaagtc

SEQ ID NO: 40869 - DNA, 21 bp, Artificial Sequence
  source: /note="Description of Artificial Sequence: Synthetic oligonucleotide"
acaagcggactcacactcgga

SEQ ID NO: 40870 - DNA, 21 bp, Artificial Sequence
  source: /note="Description of Artificial Sequence: Synthetic oligonucleotide"
acaagcggaccaagccacgga

SEQ ID NO: 40871 - DNA, 21 bp, Artificial Sequence
  source: /note="Description of Artificial Sequence: Synthetic oligonucleotide"
acaagcggaagaagcccaaca

SEQ ID NO: 40872 - DNA, 21 bp, Artificial Sequence
  source: /note="Description of Artificial Sequence: Synthetic oligonucleotide"
acaagcggaagcctcagacca

SEQ ID NO: 40873 - DNA, 21 bp, Artificial Sequence
  source: /note="Description of Artificial Sequence: Synthetic oligonucleotide"
acaagcggaagcacaagcgga

SEQ ID NO: 40874 - DNA, 21 bp, Artificial Sequence
  source: /note="Description of Artificial Sequence: Synthetic oligonucleotide"
acaagcggaacactcagcaca

SEQ ID NO: 40875 - DNA, 21 bp, Artificial Sequence
  source: /note="Description of Artificial Sequence: Synthetic oligonucleotide"
acaagcggaacaagcacagac

SEQ ID NO: 40876 - DNA, 21 bp, Artificial Sequence
  source: /note="Description of Artificial Sequence: Synthetic oligonucleotide"
acaagccacggaccagcaaca

SEQ ID NO: 40877 - DNA, 21 bp, Artificial Sequence
  source: /note="Description of Artificial Sequence: Synthetic oligonucleotide"
acaagccacaacggattcagc

SEQ ID NO: 40878 - DNA, 21 bp, Artificial Sequence
  source: /note="Description of Artificial Sequence: Synthetic oligonucleotide"
acaagccacagaccacaacca

SEQ ID NO: 40879 - DNA, 21 bp, Artificial Sequence
  source: /note="Description of Artificial Sequence: Synthetic oligonucleotide"
acaagcatcggaccaagaatc

SEQ ID NO: 40880 - DNA, 21 bp, Artificial Sequence
  source: /note="Description of Artificial Sequence: Synthetic oligonucleotide"
acaagcatcaacagactccca

SEQ ID NO: 40881 - DNA, 21 bp, Artificial Sequence
  source: /note="Description of Artificial Sequence: Synthetic oligonucleotide"
acaagcaaagacggacaccca

SEQ ID NO: 40882 - DNA, 21 bp, Artificial Sequence
  source: /note="Description of Artificial Sequence: Synthetic oligonucleotide"
acaagcaaactcagctgccca

SEQ ID NO: 40883 - DNA, 21 bp, Artificial Sequence
  source: /note="Description of Artificial Sequence: Synthetic oligonucleotide"
acaagcaaaacaccaagcatc

SEQ ID NO: 40884 - DNA, 21 bp, Artificial Sequence
  source: /note="Description of Artificial Sequence: Synthetic oligonucleotide"
acaagcaaagtcgcaacaatc

SEQ ID NO: 40885 - DNA, 21 bp, Artificial Sequence
  source: /note="Description of Artificial Sequence: Synthetic oligonucleotide"
acaagcaaatggctcacacca

SEQ ID NO: 40886 - DNA, 21 bp, Artificial Sequence
  source: /note="Description of Artificial Sequence: Synthetic oligonucleotide"
acaagcctcgacgcaagaagc

SEQ ID NO: 40887 - DNA, 21 bp, Artificial Sequence
  source: /note="Description of Artificial Sequence: Synthetic oligonucleotide"
acaagcctcggaagcgtcagc

SEQ ID NO: 40888 - DNA, 21 bp, Artificial Sequence
  source: /note="Description of Artificial Sequence: Synthetic oligonucleotide"
acaagcctccacagcggagac

SEQ ID NO: 40889 - DNA, 21 bp, Artificial Sequence
  source: /note="Description of Artificial Sequence: Synthetic oligonucleotide"
acaagcctcaacaacagactc

SEQ ID NO: 40890 - DNA, 21 bp, Artificial Sequence
  source: /note="Description of Artificial Sequence: Synthetic oligonucleotide"
acaagcctcagaatcatgcca

SEQ ID NO: 40891 - DNA, 21 bp, Artificial Sequence
  source: /note="Description of Artificial Sequence: Synthetic oligonucleotide"
acaagcctcagaatgaacgga

SEQ ID NO: 40892 - DNA, 21 bp, Artificial Sequence
  source: /note="Description of Artificial Sequence: Synthetic oligonucleotide"
acaagcctcagaagcgaccca

SEQ ID NO: 40893 - DNA, 21 bp, Artificial Sequence
  source: /note="Description of Artificial Sequence: Synthetic oligonucleotide"
acaagcctcagcctcgcactc

SEQ ID NO: 40894 - DNA, 21 bp, Artificial Sequence
  source: /note="Description of Artificial Sequence: Synthetic oligonucleotide"
acaagcctcacaccagtcagc

SEQ ID NO: 40895 - DNA, 21 bp, Artificial Sequence
  source: /note="Description of Artificial Sequence: Synthetic oligonucleotide"
acaagcctcgtcttcgcagtc

SEQ ID NO: 40896 - DNA, 21 bp, Artificial Sequence
  source: /note="Description of Artificial Sequence: Synthetic oligonucleotide"
acaagcatgaacctcccagac

SEQ ID NO: 40897 - DNA, 21 bp, Artificial Sequence
  source: /note="Description of Artificial Sequence: Synthetic oligonucleotide"
acaagcatgagaacagaactc

SEQ ID NO: 40898 - DNA, 21 bp, Artificial Sequence
  source: /note="Description of Artificial Sequence: Synthetic oligonucleotide"
acaagcatgagcccaagacac

SEQ ID NO: 40899 - DNA, 21 bp, Artificial Sequence
  source: /note="Description of Artificial Sequence: Synthetic oligonucleotide"
acaagcatgagcccaacaaca

SEQ ID NO: 40900 - DNA, 21 bp, Artificial Sequence
  source: /note="Description of Artificial Sequence: Synthetic oligonucleotide"
acaagcaacgcagtcgactac

SEQ ID NO: 40901 - DNA, 21 bp, Artificial Sequence
  source: /note="Description of Artificial Sequence: Synthetic oligonucleotide"
acaagcaacggactcaaactc

SEQ ID NO: 40902 - DNA, 21 bp, Artificial Sequence
  source: /note="Description of Artificial Sequence: Synthetic oligonucleotide"
acaagcaacccactcccaaga

SEQ ID NO: 40903 - DNA, 21 bp, Artificial Sequence
  source: /note="Description of Artificial Sequence: Synthetic oligonucleotide"
acaagcaaccaaagcgcaatg

SEQ ID NO: 40904 - DNA, 21 bp, Artificial Sequence
  source: /note="Description of Artificial Sequence: Synthetic oligonucleotide"
acaagcaacacaagcatgagc

SEQ ID NO: 40905 - DNA, 21 bp, Artificial Sequence
  source: /note="Description of Artificial Sequence: Synthetic oligonucleotide"
acaagcaacgtcagaccatac

SEQ ID NO: 40906 - DNA, 21 bp, Artificial Sequence
  source: /note="Description of Artificial Sequence: Synthetic oligonucleotide"
acaagcaactaccacagcctc

SEQ ID NO: 40907 - DNA, 21 bp, Artificial Sequence
  source: /note="Description of Artificial Sequence: Synthetic oligonucleotide"
acaagcaactacctccaaaca

SEQ ID NO: 40908 - DNA, 21 bp, Artificial Sequence
  source: /note="Description of Artificial Sequence: Synthetic oligonucleotide"
acaagcccagcaagatacagc

SEQ ID NO: 40909 - DNA, 21 bp, Artificial Sequence
  source: /note="Description of Artificial Sequence: Synthetic oligonucleotide"
acaagcccagacttcagcctc

SEQ ID NO: 40910 - DNA, 21 bp, Artificial Sequence
  source: /note="Description of Artificial Sequence: Synthetic oligonucleotide"
acaagcccagacccaaacaaa

SEQ ID NO: 40911 - DNA, 21 bp, Artificial Sequence
  source: /note="Description of Artificial Sequence: Synthetic oligonucleotide"
acaagcccaatgcacacaatc

SEQ ID NO: 40912 - DNA, 21 bp, Artificial Sequence
  source: /note="Description of Artificial Sequence: Synthetic oligonucleotide"
acaagcccaccactcagcaca

SEQ ID NO: 40913 - DNA, 21 bp, Artificial Sequence
  source: /note="Description of Artificial Sequence: Synthetic oligonucleotide"
acaagcccaacaggaccaaca

SEQ ID NO: 40914 - DNA, 21 bp, Artificial Sequence
  source: /note="Description of Artificial Sequence: Synthetic oligonucleotide"
acaagcccagtcagccacgtc

SEQ ID NO: 40915 - DNA, 21 bp, Artificial Sequence
  source: /note="Description of Artificial Sequence: Synthetic oligonucleotide"
acaagccaagcagtccacctc

SEQ ID NO: 40916 - DNA, 21 bp, Artificial Sequence
  source: /note="Description of Artificial Sequence: Synthetic oligonucleotide"
acaagccaacacagacaagca

SEQ ID NO: 40917 - DNA, 21 bp, Artificial Sequence
  source: /note="Description of Artificial Sequence: Synthetic oligonucleotide"
acaagccaaatcaacagacaa

SEQ ID NO: 40918 - DNA, 21 bp, Artificial Sequence
  source: /note="Description of Artificial Sequence: Synthetic oligonucleotide"
acaagccaacaactcccacaa

SEQ ID NO: 40919 - DNA, 21 bp, Artificial Sequence
  source: /note="Description of Artificial Sequence: Synthetic oligonucleotide"
acaagccaaagaccaatgctc

SEQ ID NO: 40920 - DNA, 21 bp, Artificial Sequence
  source: /note="Description of Artificial Sequence: Synthetic oligonucleotide"
acaagccaaagataccaacca

SEQ ID NO: 40921 - DNA, 21 bp, Artificial Sequence
  source: /note="Description of Artificial Sequence: Synthetic oligonucleotide"
acaagccaagtcagaacaaca

SEQ ID NO: 40922 - DNA, 21 bp, Artificial Sequence
  source: /note="Description of Artificial Sequence: Synthetic oligonucleotide"
acaagcagagcaccagtcctc

SEQ ID NO: 40923 - DNA, 21 bp, Artificial Sequence
  source: /note="Description of Artificial Sequence: Synthetic oligonucleotide"
acaagcagagaccacgtcaga

SEQ ID NO: 40924 - DNA, 21 bp, Artificial Sequence
  source: /note="Description of Artificial Sequence: Synthetic oligonucleotide"
acaagcagagaaacatacaca

SEQ ID NO: 40925 - DNA, 21 bp, Artificial Sequence
  source: /note="Description of Artificial Sequence: Synthetic oligonucleotide"
acaagcagaaacgaagtcgca

SEQ ID NO: 40926 - DNA, 21 bp, Artificial Sequence
  source: /note="Description of Artificial Sequence: Synthetic oligonucleotide"
acaagcagaacaatcacaaca

SEQ ID NO: 40927 - DNA, 21 bp, Artificial Sequence
  source: /note="Description of Artificial Sequence: Synthetic oligonucleotide"
acaagcagaacaaacgaccca

SEQ ID NO: 40928 - DNA, 21 bp, Artificial Sequence
  source: /note="Description of Artificial Sequence: Synthetic oligonucleotide"
acaagcagagtcgacacaagc

SEQ ID NO: 40929 - DNA, 21 bp, Artificial Sequence
  source: /note="Description of Artificial Sequence: Synthetic oligonucleotide"
acaagcagcgcaagcgcagtc

SEQ ID NO: 40930 - DNA, 21 bp, Artificial Sequence
  source: /note="Description of Artificial Sequence: Synthetic oligonucleotide"
acaagcagcgacggactcgga

SEQ ID NO: 40931 - DNA, 21 bp, Artificial Sequence
  source: /note="Description of Artificial Sequence: Synthetic oligonucleotide"
acaagcagcggattcaaagtc

SEQ ID NO: 40932 - DNA, 21 bp, Artificial Sequence
  source: /note="Description of Artificial Sequence: Synthetic oligonucleotide"
acaagcagcggactcacagga

SEQ ID NO: 40933 - DNA, 21 bp, Artificial Sequence
  source: /note="Description of Artificial Sequence: Synthetic oligonucleotide"
acaagcagcggaacaaaccaa

SEQ ID NO: 40934 - DNA, 21 bp, Artificial Sequence
  source: /note="Description of Artificial Sequence: Synthetic oligonucleotide"
acaagcagccacagcgacgtc

SEQ ID NO: 40935 - DNA, 21 bp, Artificial Sequence
  source: /note="Description of Artificial Sequence: Synthetic oligonucleotide"
acaagcagccacacagaacac

SEQ ID NO: 40936 - DNA, 21 bp, Artificial Sequence
  source: /note="Description of Artificial Sequence: Synthetic oligonucleotide"
acaagcagcctcgcacacatc

SEQ ID NO: 40937 - DNA, 21 bp, Artificial Sequence
  source: /note="Description of Artificial Sequence: Synthetic oligonucleotide"
acaagcagcctcgcaacacac

SEQ ID NO: 40938 - DNA, 21 bp, Artificial Sequence
  source: /note="Description of Artificial Sequence: Synthetic oligonucleotide"
acaagcagcctcagactcgac

SEQ ID NO: 40939 - DNA, 21 bp, Artificial Sequence
  source: /note="Description of Artificial Sequence: Synthetic oligonucleotide"
acaagcagcctcagaccacca

SEQ ID NO: 40940 - DNA, 21 bp, Artificial Sequence
  source: /note="Description of Artificial Sequence: Synthetic oligonucleotide"
acaagcagcaactacccaagc

SEQ ID NO: 40941 - DNA, 21 bp, Artificial Sequence
  source: /note="Description of Artificial Sequence: Synthetic oligonucleotide"
acaagcagcccagcactcaca

SEQ ID NO: 40942 - DNA, 21 bp, Artificial Sequence
  source: /note="Description of Artificial Sequence: Synthetic oligonucleotide"
acaagcagcccactccaagga

SEQ ID NO: 40943 - DNA, 21 bp, Artificial Sequence
  source: /note="Description of Artificial Sequence: Synthetic oligonucleotide"
acaagcagccaacacagcaca

SEQ ID NO: 40944 - DNA, 21 bp, Artificial Sequence
  source: /note="Description of Artificial Sequence: Synthetic oligonucleotide"
acaagcagcagagcatacagc

SEQ ID NO: 40945 - DNA, 21 bp, Artificial Sequence
  source: /note="Description of Artificial Sequence: Synthetic oligonucleotide"
acaagcagcagactcccattc

SEQ ID NO: 40946 - DNA, 21 bp, Artificial Sequence
  source: /note="Description of Artificial Sequence: Synthetic oligonucleotide"
acaagcagcagcgcaagagac

SEQ ID NO: 40947 - DNA, 21 bp, Artificial Sequence
  source: /note="Description of Artificial Sequence: Synthetic oligonucleotide"
acaagcagcagcggactcaca

SEQ ID NO: 40948 - DNA, 21 bp, Artificial Sequence
  source: /note="Description of Artificial Sequence: Synthetic oligonucleotide"
acaagcagcagcaacagccca

SEQ ID NO: 40949 - DNA, 21 bp, Artificial Sequence
  source: /note="Description of Artificial Sequence: Synthetic oligonucleotide"
acaagcagcacaatgagccca

SEQ ID NO: 40950 - DNA, 21 bp, Artificial Sequence
  source: /note="Description of Artificial Sequence: Synthetic oligonucleotide"
acaagcagcacatacgaagaa

SEQ ID NO: 40951 - DNA, 21 bp, Artificial Sequence
  source: /note="Description of Artificial Sequence: Synthetic oligonucleotide"
acaagcagcgtcagcagcatc

SEQ ID NO: 40952 - DNA, 21 bp, Artificial Sequence
  source: /note="Description of Artificial Sequence: Synthetic oligonucleotide"
acaagcacagcagcactccca

SEQ ID NO: 40953 - DNA, 21 bp, Artificial Sequence
  source: /note="Description of Artificial Sequence: Synthetic oligonucleotide"
acaagcacattcgaaggaatg

SEQ ID NO: 40954 - DNA, 21 bp, Artificial Sequence
  source: /note="Description of Artificial Sequence: Synthetic oligonucleotide"
acaagcacaggacacacagtc

SEQ ID NO: 40955 - DNA, 21 bp, Artificial Sequence
  source: /note="Description of Artificial Sequence: Synthetic oligonucleotide"
acaagcacaggagtcagaatg

SEQ ID NO: 40956 - DNA, 21 bp, Artificial Sequence
  source: /note="Description of Artificial Sequence: Synthetic oligonucleotide"
acaagcacactcctcagcctc

SEQ ID NO: 40957 - DNA, 21 bp, Artificial Sequence
  source: /note="Description of Artificial Sequence: Synthetic oligonucleotide"
acaagcacaaacagcctcgca

SEQ ID NO: 40958 - DNA, 21 bp, Artificial Sequence
  source: /note="Description of Artificial Sequence: Synthetic oligonucleotide"
acaagcacaagcatggcaatc

SEQ ID NO: 40959 - DNA, 21 bp, Artificial Sequence
  source: /note="Description of Artificial Sequence: Synthetic oligonucleotide"
acaagcacaagcaacagaaac

SEQ ID NO: 40960 - DNA, 21 bp, Artificial Sequence
  source: /note="Description of Artificial Sequence: Synthetic oligonucleotide"
acaagcacaacaatgccactc

SEQ ID NO: 40961 - DNA, 21 bp, Artificial Sequence
  source: /note="Description of Artificial Sequence: Synthetic oligonucleotide"
acaagcacaacagtcggaaac

SEQ ID NO: 40962 - DNA, 21 bp, Artificial Sequence
  source: /note="Description of Artificial Sequence: Synthetic oligonucleotide"
acaagcacagtcagcccaaaa

SEQ ID NO: 40963 - DNA, 21 bp, Artificial Sequence
  source: /note="Description of Artificial Sequence: Synthetic oligonucleotide"
acaagcgtcgaaagaagctgg

SEQ ID NO: 40964 - DNA, 21 bp, Artificial Sequence
  source: /note="Description of Artificial Sequence: Synthetic oligonucleotide"
acaagcgtcggagaccacttc

SEQ ID NO: 40965 - DNA, 21 bp, Artificial Sequence
  source: /note="Description of Artificial Sequence: Synthetic oligonucleotide"
acaagcgtcggatggcaacca

SEQ ID NO: 40966 - DNA, 21 bp, Artificial Sequence
  source: /note="Description of Artificial Sequence: Synthetic oligonucleotide"
acaagcgtcaaaagcgcaagc

SEQ ID NO: 40967 - DNA, 21 bp, Artificial Sequence
  source: /note="Description of Artificial Sequence: Synthetic oligonucleotide"
acaagcgtccaaccaccacca

SEQ ID NO: 40968 - DNA, 21 bp, Artificial Sequence
  source: /note="Description of Artificial Sequence: Synthetic oligonucleotide"
acaagcgtcagccacgcagga

SEQ ID NO: 40969 - DNA, 21 bp, Artificial Sequence
  source: /note="Description of Artificial Sequence: Synthetic oligonucleotide"
acaagcgtcacaatgaaagtc

SEQ ID NO: 40970 - DNA, 21 bp, Artificial Sequence
  source: /note="Description of Artificial Sequence: Synthetic oligonucleotide"
acaagcgtcacaacacactac

SEQ ID NO: 40971 - DNA, 21 bp, Artificial Sequence
  source: /note="Description of Artificial Sequence: Synthetic oligonucleotide"
acaagctggcaaggagcagtc

SEQ ID NO: 40972 - DNA, 21 bp, Artificial Sequence
  source: /note="Description of Artificial Sequence: Synthetic oligonucleotide"
acaagctacggaccaaaagtc

SEQ ID NO: 40973 - DNA, 21 bp, Artificial Sequence
  source: /note="Description of Artificial Sequence: Synthetic oligonucleotide"
acaagctaccaaagaatcgaa

SEQ ID NO: 40974 - DNA, 21 bp, Artificial Sequence
  source: /note="Description of Artificial Sequence: Synthetic oligonucleotide"
acaacagcagcaaaagtcgga

SEQ ID NO: 40975 - DNA, 21 bp, Artificial Sequence
  source: /note="Description of Artificial Sequence: Synthetic oligonucleotide"
acaacagcagaatacacaaga

SEQ ID NO: 40976 - DNA, 21 bp, Artificial Sequence
  source: /note="Description of Artificial Sequence: Synthetic oligonucleotide"
acaacagcactcccacaattc

SEQ ID NO: 40977 - DNA, 21 bp, Artificial Sequence
  source: /note="Description of Artificial Sequence: Synthetic oligonucleotide"
acaacagcaatgagaggacca

SEQ ID NO: 40978 - DNA, 21 bp, Artificial Sequence
  source: /note="Description of Artificial Sequence: Synthetic oligonucleotide"
acaacagcaagacaattccaa

SEQ ID NO: 40979 - DNA, 21 bp, Artificial Sequence
  source: /note="Description of Artificial Sequence: Synthetic oligonucleotide"
acaacagcagtcagcagcaaa

SEQ ID NO: 40980 - DNA, 21 bp, Artificial Sequence
  source: /note="Description of Artificial Sequence: Synthetic oligonucleotide"
acaacagacgcagcaagacca

SEQ ID NO: 40981 - DNA, 21 bp, Artificial Sequence
  source: /note="Description of Artificial Sequence: Synthetic oligonucleotide"
acaacagactgctgcgcagca

SEQ ID NO: 40982 - DNA, 21 bp, Artificial Sequence
  source: /note="Description of Artificial Sequence: Synthetic oligonucleotide"
acaacagacgtctacgtcaga

SEQ ID NO: 40983 - DNA, 21 bp, Artificial Sequence
  source: /note="Description of Artificial Sequence: Synthetic oligonucleotide"
acaacagactacccactcagc

SEQ ID NO: 40984 - DNA, 21 bp, Artificial Sequence
  source: /note="Description of Artificial Sequence: Synthetic oligonucleotide"
acaacagaacacggatacgtc

SEQ ID NO: 40985 - DNA, 21 bp, Artificial Sequence
  source: /note="Description of Artificial Sequence: Synthetic oligonucleotide"
acaacattcctccaaaacgga

SEQ ID NO: 40986 - DNA, 21 bp, Artificial Sequence
  source: /note="Description of Artificial Sequence: Synthetic oligonucleotide"
acaacaggagcaatcgacatc

SEQ ID NO: 40987 - DNA, 21 bp, Artificial Sequence
  source: /note="Description of Artificial Sequence: Synthetic oligonucleotide"
acaacaggacacctcagcgtc

SEQ ID NO: 40988 - DNA, 21 bp, Artificial Sequence
  source: /note="Description of Artificial Sequence: Synthetic oligonucleotide"
acaacaggacacacactcatc

SEQ ID NO: 40989 - DNA, 21 bp, Artificial Sequence
  source: /note="Description of Artificial Sequence: Synthetic oligonucleotide"
acaacaggactcagcctcgga

SEQ ID NO: 40990 - DNA, 21 bp, Artificial Sequence
  source: /note="Description of Artificial Sequence: Synthetic oligonucleotide"
acaacaggaaacagcctccca

SEQ ID NO: 40991 - DNA, 21 bp, Artificial Sequence
  source: /note="Description of Artificial Sequence: Synthetic oligonucleotide"
acaacaggaaacacactcagc

SEQ ID NO: 40992 - DNA, 21 bp, Artificial Sequence
  source: /note="Description of Artificial Sequence: Synthetic oligonucleotide"
acaacaggaagcatcccacac

SEQ ID NO: 40993 - DNA, 21 bp, Artificial Sequence
  source: /note="Description of Artificial Sequence: Synthetic oligonucleotide"
acaacacacgcaccactcagc

SEQ ID NO: 40994 - DNA, 21 bp, Artificial Sequence
  source: /note="Description of Artificial Sequence: Synthetic oligonucleotide"
acaacacacgcaagctgcaca

SEQ ID NO: 40995 - DNA, 21 bp, Artificial Sequence
  source: /note="Description of Artificial Sequence: Synthetic oligonucleotide"
acaacacacgacgtctacaga

SEQ ID NO: 40996 - DNA, 21 bp, Artificial Sequence
  source: /note="Description of Artificial Sequence: Synthetic oligonucleotide"
acaacacacagcacagcagca

SEQ ID NO: 40997 - DNA, 21 bp, Artificial Sequence
  source: /note="Description of Artificial Sequence: Synthetic oligonucleotide"
acaacacacacacaatacaga

SEQ ID NO: 40998 - DNA, 21 bp, Artificial Sequence
  source: /note="Description of Artificial Sequence: Synthetic oligonucleotide"
acaacaatcctcggaccaatg

SEQ ID NO: 40999 - DNA, 21 bp, Artificial Sequence
  source: /note="Description of Artificial Sequence: Synthetic oligonucleotide"
acaacaaaaatcggagacgac

SEQ ID NO: 41000 - DNA, 21 bp, Artificial Sequence
  source: /note="Description of Artificial Sequence: Synthetic oligonucleotide"
acaacaaaaagcgcagacaca

SEQ ID NO: 41001 - DNA, 21 bp, Artificial Sequence
  source: /note="Description of Artificial Sequence: Synthetic oligonucleotide"
acaacaaaagtcggaagccca

SEQ ID NO: 41002 - DNA, 21 bp, Artificial Sequence
  source: /note="Description of Artificial Sequence: Synthetic oligonucleotide"
acaacactcgacccaagcctc

SEQ ID NO: 41003 - DNA, 21 bp, Artificial Sequence
  source: /note="Description of Artificial Sequence: Synthetic oligonucleotide"
acaacactcggaccaagcaga

SEQ ID NO: 41004 - DNA, 21 bp, Artificial Sequence
  source: /note="Description of Artificial Sequence: Synthetic oligonucleotide"
acaacactcggaagcgcagtc

SEQ ID NO: 41005 - DNA, 21 bp, Artificial Sequence
  source: /note="Description of Artificial Sequence: Synthetic oligonucleotide"
acaacactcagcggaggaaca

SEQ ID NO: 41006 - DNA, 21 bp, Artificial Sequence
  source: /note="Description of Artificial Sequence: Synthetic oligonucleotide"
acaacactcagcccaaacaaa

SEQ ID NO: 41007 - DNA, 21 bp, Artificial Sequence
  source: /note="Description of Artificial Sequence: Synthetic oligonucleotide"
acaacactcagcccaagagga

SEQ ID NO: 41008 - DNA, 21 bp, Artificial Sequence
  source: /note="Description of Artificial Sequence: Synthetic oligonucleotide"
acaacactcagcagcctcgca

SEQ ID NO: 41009 - DNA, 21 bp, Artificial Sequence
  source: /note="Description of Artificial Sequence: Synthetic oligonucleotide"
acaacaatggcactcggagca

SEQ ID NO: 41010 - DNA, 21 bp, Artificial Sequence
  source: /note="Description of Artificial Sequence: Synthetic oligonucleotide"
acaacaatgaaaccagaagca

SEQ ID NO: 41011 - DNA, 21 bp, Artificial Sequence
  source: /note="Description of Artificial Sequence: Synthetic oligonucleotide"
acaacaatgacactcgtcagc

SEQ ID NO: 41012 - DNA, 21 bp, Artificial Sequence
  source: /note="Description of Artificial Sequence: Synthetic oligonucleotide"
acaacaatgtacacaacaaca

SEQ ID NO: 41013 - DNA, 21 bp, Artificial Sequence
  source: /note="Description of Artificial Sequence: Synthetic oligonucleotide"
acaacaaacgcacaaggagga

SEQ ID NO: 41014 - DNA, 21 bp, Artificial Sequence
  source: /note="Description of Artificial Sequence: Synthetic oligonucleotide"
acaacaaacatcgtcagacaa

SEQ ID NO: 41015 - DNA, 21 bp, Artificial Sequence
  source: /note="Description of Artificial Sequence: Synthetic oligonucleotide"
acaacaaacctcgcaatgatg

SEQ ID NO: 41016 - DNA, 21 bp, Artificial Sequence
  source: /note="Description of Artificial Sequence: Synthetic oligonucleotide"
acaacaccaggatacgcacca

SEQ ID NO: 41017 - DNA, 21 bp, Artificial Sequence
  source: /note="Description of Artificial Sequence: Synthetic oligonucleotide"
acaacaccaatcagagacgga

SEQ ID NO: 41018 - DNA, 21 bp, Artificial Sequence
  source: /note="Description of Artificial Sequence: Synthetic oligonucleotide"
acaacaccactcacaaaagga

SEQ ID NO: 41019 - DNA, 21 bp, Artificial Sequence
  source: /note="Description of Artificial Sequence: Synthetic oligonucleotide"
acaacaccaccaatgcacctc

SEQ ID NO: 41020 - DNA, 21 bp, Artificial Sequence
  source: /note="Description of Artificial Sequence: Synthetic oligonucleotide"
acaacaccacaactcaacctc

SEQ ID NO: 41021 - DNA, 21 bp, Artificial Sequence
  source: /note="Description of Artificial Sequence: Synthetic oligonucleotide"
acaacaccaagactcctcagc

SEQ ID NO: 41022 - DNA, 21 bp, Artificial Sequence
  source: /note="Description of Artificial Sequence: Synthetic oligonucleotide"
acaacaccaacagacggagca

SEQ ID NO: 41023 - DNA, 21 bp, Artificial Sequence
  source: /note="Description of Artificial Sequence: Synthetic oligonucleotide"
acaacaccaacaaacagacca

SEQ ID NO: 41024 - DNA, 21 bp, Artificial Sequence
  source: /note="Description of Artificial Sequence: Synthetic oligonucleotide"
acaacacaagaacacctccca

SEQ ID NO: 41025 - DNA, 21 bp, Artificial Sequence
  source: /note="Description of Artificial Sequence: Synthetic oligonucleotide"
acaacacaaaacgtcaaccaa

SEQ ID NO: 41026 - DNA, 21 bp, Artificial Sequence
  source: /note="Description of Artificial Sequence: Synthetic oligonucleotide"
acaacacaaagcacatacgaa

SEQ ID NO: 41027 - DNA, 21 bp, Artificial Sequence
  source: /note="Description of Artificial Sequence: Synthetic oligonucleotide"
acaacacaaacagcagaaaca

SEQ ID NO: 41028 - DNA, 21 bp, Artificial Sequence
  source: /note="Description of Artificial Sequence: Synthetic oligonucleotide"
acaacaagagacccaccagca

SEQ ID NO: 41029 - DNA, 21 bp, Artificial Sequence
  source: /note="Description of Artificial Sequence: Synthetic oligonucleotide"
acaacaagaggagacgaacca

SEQ ID NO: 41030 - DNA, 21 bp, Artificial Sequence
  source: /note="Description of Artificial Sequence: Synthetic oligonucleotide"
acaacaagaatcgcagcagaa

SEQ ID NO: 41031 - DNA, 21 bp, Artificial Sequence
  source: /note="Description of Artificial Sequence: Synthetic oligonucleotide"
acaacaagactcgcactcgca

SEQ ID NO: 41032 - DNA, 21 bp, Artificial Sequence
  source: /note="Description of Artificial Sequence: Synthetic oligonucleotide"
acaacaagactcgtcagccca

SEQ ID NO: 41033 - DNA, 21 bp, Artificial Sequence
  source: /note="Description of Artificial Sequence: Synthetic oligonucleotide"
acaacaagaccaccacactac

SEQ ID NO: 41034 - DNA, 21 bp, Artificial Sequence
  source: /note="Description of Artificial Sequence: Synthetic oligonucleotide"
acaacaagaccaagcgaacca

SEQ ID NO: 41035 - DNA, 21 bp, Artificial Sequence
  source: /note="Description of Artificial Sequence: Synthetic oligonucleotide"
acaacaagacaaagcgacaac

SEQ ID NO: 41036 - DNA, 21 bp, Artificial Sequence
  source: /note="Description of Artificial Sequence: Synthetic oligonucleotide"
acaacaagaagcgcagcaagc

SEQ ID NO: 41037 - DNA, 21 bp, Artificial Sequence
  source: /note="Description of Artificial Sequence: Synthetic oligonucleotide"
acaacaagaagcgaaagcgga

SEQ ID NO: 41038 - DNA, 21 bp, Artificial Sequence
  source: /note="Description of Artificial Sequence: Synthetic oligonucleotide"
acaacaagaagcgtcctccaa

SEQ ID NO: 41039 - DNA, 21 bp, Artificial Sequence
  source: /note="Description of Artificial Sequence: Synthetic oligonucleotide"
acaacaagagtcgaaatggca

SEQ ID NO: 41040 - DNA, 21 bp, Artificial Sequence
  source: /note="Description of Artificial Sequence: Synthetic oligonucleotide"
acaacaagagtcggactcgtc

SEQ ID NO: 41041 - DNA, 21 bp, Artificial Sequence
  source: /note="Description of Artificial Sequence: Synthetic oligonucleotide"
acaacaagcgcagaccacagc

SEQ ID NO: 41042 - DNA, 21 bp, Artificial Sequence
  source: /note="Description of Artificial Sequence: Synthetic oligonucleotide"
acaacaagcgcaagagaactc

SEQ ID NO: 41043 - DNA, 21 bp, Artificial Sequence
  source: /note="Description of Artificial Sequence: Synthetic oligonucleotide"
acaacaagcggagacagactc

SEQ ID NO: 41044 - DNA, 21 bp, Artificial Sequence
  source: /note="Description of Artificial Sequence: Synthetic oligonucleotide"
acaacaagcggattcagccca

SEQ ID NO: 41045 - DNA, 21 bp, Artificial Sequence
  source: /note="Description of Artificial Sequence: Synthetic oligonucleotide"
acaacaagccacgcaccaagc

SEQ ID NO: 41046 - DNA, 21 bp, Artificial Sequence
  source: /note="Description of Artificial Sequence: Synthetic oligonucleotide"
acaacaagccacccactcatg

SEQ ID NO: 41047 - DNA, 21 bp, Artificial Sequence
  source: /note="Description of Artificial Sequence: Synthetic oligonucleotide"
acaacaagcatcggaagcgca

SEQ ID NO: 41048 - DNA, 21 bp, Artificial Sequence
  source: /note="Description of Artificial Sequence: Synthetic oligonucleotide"
acaacaagcctcggaagagtc

SEQ ID NO: 41049 - DNA, 21 bp, Artificial Sequence
  source: /note="Description of Artificial Sequence: Synthetic oligonucleotide"
acaacaagcctcatggaagca

SEQ ID NO: 41050 - DNA, 21 bp, Artificial Sequence
  source: /note="Description of Artificial Sequence: Synthetic oligonucleotide"
acaacaagcaacgtccacaca

SEQ ID NO: 41051 - DNA, 21 bp, Artificial Sequence
  source: /note="Description of Artificial Sequence: Synthetic oligonucleotide"
acaacaagcccactcagaaca

SEQ ID NO: 41052 - DNA, 21 bp, Artificial Sequence
  source: /note="Description of Artificial Sequence: Synthetic oligonucleotide"
acaacaagcccacaaagaagc

SEQ ID NO: 41053 - DNA, 21 bp, Artificial Sequence
  source: /note="Description of Artificial Sequence: Synthetic oligonucleotide"
acaacaagcagactcagcgca

SEQ ID NO: 41054 - DNA, 21 bp, Artificial Sequence
  source: /note="Description of Artificial Sequence: Synthetic oligonucleotide"
acaacaagcagcagcccaagc

SEQ ID NO: 41055 - DNA, 21 bp, Artificial Sequence
  source: /note="Description of Artificial Sequence: Synthetic oligonucleotide"
acaacaacagcaatgatcgtc

SEQ ID NO: 41056 - DNA, 21 bp, Artificial Sequence
  source: /note="Description of Artificial Sequence: Synthetic oligonucleotide"
acaacaacagcaagcttcgaa

SEQ ID NO: 41057 - DNA, 21 bp, Artificial Sequence
  source: /note="Description of Artificial Sequence: Synthetic oligonucleotide"
acaacaacagacaaaccactc

SEQ ID NO: 41058 - DNA, 21 bp, Artificial Sequence
  source: /note="Description of Artificial Sequence: Synthetic oligonucleotide"
acaacaacagacgtcgcaaga

SEQ ID NO: 41059 - DNA, 21 bp, Artificial Sequence
  source: /note="Description of Artificial Sequence: Synthetic oligonucleotide"
acaacaacagaaagaacaaga

SEQ ID NO: 41060 - DNA, 21 bp, Artificial Sequence
  source: /note="Description of Artificial Sequence: Synthetic oligonucleotide"
acaacaacaaaacacgtctac

SEQ ID NO: 41061 - DNA, 21 bp, Artificial Sequence
  source: /note="Description of Artificial Sequence: Synthetic oligonucleotide"
acaacaacaccaatcacaaac

SEQ ID NO: 41062 - DNA, 21 bp, Artificial Sequence
  source: /note="Description of Artificial Sequence: Synthetic oligonucleotide"
acaacaacaagagtcaacgca

SEQ ID NO: 41063 - DNA, 21 bp, Artificial Sequence
  source: /note="Description of Artificial Sequence: Synthetic oligonucleotide"
acaacaacagtcccaatcttc

SEQ ID NO: 41064 - DNA, 21 bp, Artificial Sequence
  source: /note="Description of Artificial Sequence: Synthetic oligonucleotide"
acaacaacagtcacatacctc

SEQ ID NO: 41065 - DNA, 21 bp, Artificial Sequence
  source: /note="Description of Artificial Sequence: Synthetic oligonucleotide"
acaacagtcgacgtcgtccac

SEQ ID NO: 41066 - DNA, 21 bp, Artificial Sequence
  source: /note="Description of Artificial Sequence: Synthetic oligonucleotide"
acaacagtcccagacagcgtc

SEQ ID NO: 41067 - DNA, 21 bp, Artificial Sequence
  source: /note="Description of Artificial Sequence: Synthetic oligonucleotide"
acaacagtcccaaacacaagc

SEQ ID NO: 41068 - DNA, 21 bp, Artificial Sequence
  source: /note="Description of Artificial Sequence: Synthetic oligonucleotide"
acaacagtcagagtccaccca

SEQ ID NO: 41069 - DNA, 21 bp, Artificial Sequence
  source: /note="Description of Artificial Sequence: Synthetic oligonucleotide"
acaacagtcgtcagcgacctc

SEQ ID NO: 41070 - DNA, 21 bp, Artificial Sequence
  source: /note="Description of Artificial Sequence: Synthetic oligonucleotide"
acaacagtcgtctacacagca

SEQ ID NO: 41071 - DNA, 21 bp, Artificial Sequence
  source: /note="Description of Artificial Sequence: Synthetic oligonucleotide"
acaacatacccaatccacgca

SEQ ID NO: 41072 - DNA, 21 bp, Artificial Sequence
  source: /note="Description of Artificial Sequence: Synthetic oligonucleotide"
acaacatacagcaacagcgca

SEQ ID NO: 41073 - DNA, 21 bp, Artificial Sequence
  source: /note="Description of Artificial Sequence: Synthetic oligonucleotide"
acagtcgcaggaaacatcgca

SEQ ID NO: 41074 - DNA, 21 bp, Artificial Sequence
  source: /note="Description of Artificial Sequence: Synthetic oligonucleotide"
acagtcgcacacagaatccca

SEQ ID NO: 41075 - DNA, 21 bp, Artificial Sequence
  source: /note="Description of Artificial Sequence: Synthetic oligonucleotide"
acagtcgcaatccacgaacca

SEQ ID NO: 41076 - DNA, 21 bp, Artificial Sequence
  source: /note="Description of Artificial Sequence: Synthetic oligonucleotide"
acagtcgcaccagacctcaac

SEQ ID NO: 41077 - DNA, 21 bp, Artificial Sequence
  source: /note="Description of Artificial Sequence: Synthetic oligonucleotide"
acagtctgcgtcagcagaaca

SEQ ID NO: 41078 - DNA, 21 bp, Artificial Sequence
  source: /note="Description of Artificial Sequence: Synthetic oligonucleotide"
acagtcgacgaatgggcagga

SEQ ID NO: 41079 - DNA, 21 bp, Artificial Sequence
  source: /note="Description of Artificial Sequence: Synthetic oligonucleotide"
acagtcgacggaagccaccaa

SEQ ID NO: 41080 - DNA, 21 bp, Artificial Sequence
  source: /note="Description of Artificial Sequence: Synthetic oligonucleotide"
acagtcgacagcagcggagtc

SEQ ID NO: 41081 - DNA, 21 bp, Artificial Sequence
  source: /note="Description of Artificial Sequence: Synthetic oligonucleotide"
acagtcgacacaaaacacagc

SEQ ID NO: 41082 - DNA, 21 bp, Artificial Sequence
  source: /note="Description of Artificial Sequence: Synthetic oligonucleotide"
acagtcgaaggagacagactc

SEQ ID NO: 41083 - DNA, 21 bp, Artificial Sequence
  source: /note="Description of Artificial Sequence: Synthetic oligonucleotide"
acagtcttcagcgaaagcgaa

SEQ ID NO: 41084 - DNA, 21 bp, Artificial Sequence
  source: /note="Description of Artificial Sequence: Synthetic oligonucleotide"
acagtcggacacctcaacgtc

SEQ ID NO: 41085 - DNA, 21 bp, Artificial Sequence
  source: /note="Description of Artificial Sequence: Synthetic oligonucleotide"
acagtcggaaactacagagac

SEQ ID NO: 41086 - DNA, 21 bp, Artificial Sequence
  source: /note="Description of Artificial Sequence: Synthetic oligonucleotide"
acagtcggaagcctcagcgac

SEQ ID NO: 41087 - DNA, 21 bp, Artificial Sequence
  source: /note="Description of Artificial Sequence: Synthetic oligonucleotide"
acagtcggaacactcatgctc

SEQ ID NO: 41088 - DNA, 21 bp, Artificial Sequence
  source: /note="Description of Artificial Sequence: Synthetic oligonucleotide"
acagtcggaacaccaccaaca

SEQ ID NO: 41089 - DNA, 21 bp, Artificial Sequence
  source: /note="Description of Artificial Sequence: Synthetic oligonucleotide"
acagtcggaacaagagcaatg

SEQ ID NO: 41090 - DNA, 21 bp, Artificial Sequence
  source: /note="Description of Artificial Sequence: Synthetic oligonucleotide"
acagtcggagtcgaaggaagc

SEQ ID NO: 41091 - DNA, 21 bp, Artificial Sequence
  source: /note="Description of Artificial Sequence: Synthetic oligonucleotide"
acagtcggagtcaacgcaagc

SEQ ID NO: 41092 - DNA, 21 bp, Artificial Sequence
  source: /note="Description of Artificial Sequence: Synthetic oligonucleotide"
acagtccacttcagccaagca

SEQ ID NO: 41093 - DNA, 21 bp, Artificial Sequence
  source: /note="Description of Artificial Sequence: Synthetic oligonucleotide"
acagtccacatcctcacacca

SEQ ID NO: 41094 - DNA, 21 bp, Artificial Sequence
  source: /note="Description of Artificial Sequence: Synthetic oligonucleotide"
acagtccacaacgtccaattc

SEQ ID NO: 41095 - DNA, 21 bp, Artificial Sequence
  source: /note="Description of Artificial Sequence: Synthetic oligonucleotide"
acagtccacagacaagtcgac

SEQ ID NO: 41096 - DNA, 21 bp, Artificial Sequence
  source: /note="Description of Artificial Sequence: Synthetic oligonucleotide"
acagtccacacattcagagaa

SEQ ID NO: 41097 - DNA, 21 bp, Artificial Sequence
  source: /note="Description of Artificial Sequence: Synthetic oligonucleotide"
acagtcaaaatcagcgaagga

SEQ ID NO: 41098 - DNA, 21 bp, Artificial Sequence
  source: /note="Description of Artificial Sequence: Synthetic oligonucleotide"
acagtcaaacaaagccaagtc

SEQ ID NO: 41099 - DNA, 21 bp, Artificial Sequence
  source: /note="Description of Artificial Sequence: Synthetic oligonucleotide"
acagtcaaagtcagcaaacca

SEQ ID NO: 41100 - DNA, 21 bp, Artificial Sequence
  source: /note="Description of Artificial Sequence: Synthetic oligonucleotide"
acagtcctcgcagcaagagga

SEQ ID NO: 41101 - DNA, 21 bp, Artificial Sequence
  source: /note="Description of Artificial Sequence: Synthetic oligonucleotide"
acagtcctcgcaagcccagtc

SEQ ID NO: 41102 - DNA, 21 bp, Artificial Sequence
  source: /note="Description of Artificial Sequence: Synthetic oligonucleotide"
acagtcctcgaaagccaaagc

SEQ ID NO: 41103 - DNA, 21 bp, Artificial Sequence
  source: /note="Description of Artificial Sequence: Synthetic oligonucleotide"
acagtcctcaaaacaagcatc

SEQ ID NO: 41104 - DNA, 21 bp, Artificial Sequence
  source: /note="Description of Artificial Sequence: Synthetic oligonucleotide"
acagtcatgagaacactcgca

SEQ ID NO: 41105 - DNA, 21 bp, Artificial Sequence
  source: /note="Description of Artificial Sequence: Synthetic oligonucleotide"
acagtcatgagagtcacagga

SEQ ID NO: 41106 - DNA, 21 bp, Artificial Sequence
  source: /note="Description of Artificial Sequence: Synthetic oligonucleotide"
acagtcaacggactcagagca

SEQ ID NO: 41107 - DNA, 21 bp, Artificial Sequence
  source: /note="Description of Artificial Sequence: Synthetic oligonucleotide"
acagtcaaccaccaaagcctc

SEQ ID NO: 41108 - DNA, 21 bp, Artificial Sequence
  source: /note="Description of Artificial Sequence: Synthetic oligonucleotide"
acagtcaacatcgaaacaaac

SEQ ID NO: 41109 - DNA, 21 bp, Artificial Sequence
  source: /note="Description of Artificial Sequence: Synthetic oligonucleotide"
acagtcaacaaagtctgcctc

SEQ ID NO: 41110 - DNA, 21 bp, Artificial Sequence
  source: /note="Description of Artificial Sequence: Synthetic oligonucleotide"
acagtcaactacaacgacatc

SEQ ID NO: 41111 - DNA, 21 bp, Artificial Sequence
  source: /note="Description of Artificial Sequence: Synthetic oligonucleotide"
acagtcccagcaggacacgaa

SEQ ID NO: 41112 - DNA, 21 bp, Artificial Sequence
  source: /note="Description of Artificial Sequence: Synthetic oligonucleotide"
acagtcccagcaagaacaatg

SEQ ID NO: 41113 - DNA, 21 bp, Artificial Sequence
  source: /note="Description of Artificial Sequence: Synthetic oligonucleotide"
acagtcccacaaagcgtcctc

SEQ ID NO: 41114 - DNA, 21 bp, Artificial Sequence
  source: /note="Description of Artificial Sequence: Synthetic oligonucleotide"
acagtcccaacagcagtcgca

SEQ ID NO: 41115 - DNA, 21 bp, Artificial Sequence
  source: /note="Description of Artificial Sequence: Synthetic oligonucleotide"
acagtcccagtcgcaatcgtc

SEQ ID NO: 41116 - DNA, 21 bp, Artificial Sequence
  source: /note="Description of Artificial Sequence: Synthetic oligonucleotide"
acagtccaagacacattcaga

SEQ ID NO: 41117 - DNA, 21 bp, Artificial Sequence
  source: /note="Description of Artificial Sequence: Synthetic oligonucleotide"
acagtccaaggaatcgacaga

SEQ ID NO: 41118 - DNA, 21 bp, Artificial Sequence
  source: /note="Description of Artificial Sequence: Synthetic oligonucleotide"
acagtccaacaacaagcaaac

SEQ ID NO: 41119 - DNA, 21 bp, Artificial Sequence
  source: /note="Description of Artificial Sequence: Synthetic oligonucleotide"
acagtccaaagcccactcctc

SEQ ID NO: 41120 - DNA, 21 bp, Artificial Sequence
  source: /note="Description of Artificial Sequence: Synthetic oligonucleotide"
acagtccaaagcagcgcaaca

SEQ ID NO: 41121 - DNA, 21 bp, Artificial Sequence
  source: /note="Description of Artificial Sequence: Synthetic oligonucleotide"
acagtccaaacaacaagcaca

SEQ ID NO: 41122 - DNA, 21 bp, Artificial Sequence
  source: /note="Description of Artificial Sequence: Synthetic oligonucleotide"
acagtccaagtcagactccca

SEQ ID NO: 41123 - DNA, 21 bp, Artificial Sequence
  source: /note="Description of Artificial Sequence: Synthetic oligonucleotide"
acagtcagaggaatcagcctc

SEQ ID NO: 41124 - DNA, 21 bp, Artificial Sequence
  source: /note="Description of Artificial Sequence: Synthetic oligonucleotide"
acagtcagaggactcgacaca

SEQ ID NO: 41125 - DNA, 21 bp, Artificial Sequence
  source: /note="Description of Artificial Sequence: Synthetic oligonucleotide"
acagtcagaggaagcccactc

SEQ ID NO: 41126 - DNA, 21 bp, Artificial Sequence
  source: /note="Description of Artificial Sequence: Synthetic oligonucleotide"
acagtcagactcgacggagtc

SEQ ID NO: 41127 - DNA, 21 bp, Artificial Sequence
  source: /note="Description of Artificial Sequence: Synthetic oligonucleotide"
acagtcagaccagtcagcagc

SEQ ID NO: 41128 - DNA, 21 bp, Artificial Sequence
  source: /note="Description of Artificial Sequence: Synthetic oligonucleotide"
acagtcagaagcccaagcatc

SEQ ID NO: 41129 - DNA, 21 bp, Artificial Sequence
  source: /note="Description of Artificial Sequence: Synthetic oligonucleotide"
acagtcagcgcacaaccaaga

SEQ ID NO: 41130 - DNA, 21 bp, Artificial Sequence
  source: /note="Description of Artificial Sequence: Synthetic oligonucleotide"
acagtcagcgacacaagcttc

SEQ ID NO: 41131 - DNA, 21 bp, Artificial Sequence
  source: /note="Description of Artificial Sequence: Synthetic oligonucleotide"
acagtcagcggaaaacacaca

SEQ ID NO: 41132 - DNA, 21 bp, Artificial Sequence
  source: /note="Description of Artificial Sequence: Synthetic oligonucleotide"
acagtcagccacggacaaaga

SEQ ID NO: 41133 - DNA, 21 bp, Artificial Sequence
  source: /note="Description of Artificial Sequence: Synthetic oligonucleotide"
acagtcagcaaaatgggagga

SEQ ID NO: 41134 - DNA, 21 bp, Artificial Sequence
  source: /note="Description of Artificial Sequence: Synthetic oligonucleotide"
acagtcagcagaaacgacgca

SEQ ID NO: 41135 - DNA, 21 bp, Artificial Sequence
  source: /note="Description of Artificial Sequence: Synthetic oligonucleotide"
acagtcagcagacaagtctgc

SEQ ID NO: 41136 - DNA, 21 bp, Artificial Sequence
  source: /note="Description of Artificial Sequence: Synthetic oligonucleotide"
acagtcagcacaacatgcgca

SEQ ID NO: 41137 - DNA, 21 bp, Artificial Sequence
  source: /note="Description of Artificial Sequence: Synthetic oligonucleotide"
acagtcagcgtcacaaaacca

SEQ ID NO: 41138 - DNA, 21 bp, Artificial Sequence
  source: /note="Description of Artificial Sequence: Synthetic oligonucleotide"
acagtcagcgtcgtcgacaaa

SEQ ID NO: 41139 - DNA, 21 bp, Artificial Sequence
  source: /note="Description of Artificial Sequence: Synthetic oligonucleotide"
acagtcacagaagcaagaaac

SEQ ID NO: 41140 - DNA, 21 bp, Artificial Sequence
  source: /note="Description of Artificial Sequence: Synthetic oligonucleotide"
acagtcacaggaaacggattc

SEQ ID NO: 41141 - DNA, 21 bp, Artificial Sequence
  source: /note="Description of Artificial Sequence: Synthetic oligonucleotide"
acagtcacacacaacatggaa

SEQ ID NO: 41142 - DNA, 21 bp, Artificial Sequence
  source: /note="Description of Artificial Sequence: Synthetic oligonucleotide"
acagtcacaaacccaagaaac

SEQ ID NO: 41143 - DNA, 21 bp, Artificial Sequence
  source: /note="Description of Artificial Sequence: Synthetic oligonucleotide"
acagtcacaccagcagtcaac

SEQ ID NO: 41144 - DNA, 21 bp, Artificial Sequence
  source: /note="Description of Artificial Sequence: Synthetic oligonucleotide"
acagtcacaagacacccaagc

SEQ ID NO: 41145 - DNA, 21 bp, Artificial Sequence
  source: /note="Description of Artificial Sequence: Synthetic oligonucleotide"
acagtcacaacagcagaaaga

SEQ ID NO: 41146 - DNA, 21 bp, Artificial Sequence
  source: /note="Description of Artificial Sequence: Synthetic oligonucleotide"
acagtcacaacaggaagatgg

SEQ ID NO: 41147 - DNA, 21 bp, Artificial Sequence
  source: /note="Description of Artificial Sequence: Synthetic oligonucleotide"
acagtcacaacaagacaagca

SEQ ID NO: 41148 - DNA, 21 bp, Artificial Sequence
  source: /note="Description of Artificial Sequence: Synthetic oligonucleotide"
acagtcgtcaaaagcggagac

SEQ ID NO: 41149 - DNA, 21 bp, Artificial Sequence
  source: /note="Description of Artificial Sequence: Synthetic oligonucleotide"
acagtcgtcctcacaagcgga

SEQ ID NO: 41150 - DNA, 21 bp, Artificial Sequence
  source: /note="Description of Artificial Sequence: Synthetic oligonucleotide"
acagtcgtcccaagcggaaga

SEQ ID NO: 41151 - DNA, 21 bp, Artificial Sequence
  source: /note="Description of Artificial Sequence: Synthetic oligonucleotide"
acagtcgtcccagtcccagga

SEQ ID NO: 41152 - DNA, 21 bp, Artificial Sequence
  source: /note="Description of Artificial Sequence: Synthetic oligonucleotide"
acagtctacagcggaagacca

SEQ ID NO: 41153 - DNA, 21 bp, Artificial Sequence
  source: /note="Description of Artificial Sequence: Synthetic oligonucleotide"
acagtctacagcccaaacaca

SEQ ID NO: 41154 - DNA, 21 bp, Artificial Sequence
  source: /note="Description of Artificial Sequence: Synthetic oligonucleotide"
acatggaacgcaacaatgaac

SEQ ID NO: 41155 - DNA, 21 bp, Artificial Sequence
  source: /note="Description of Artificial Sequence: Synthetic oligonucleotide"
acatggcaagacaacagagca

SEQ ID NO: 41156 - DNA, 21 bp, Artificial Sequence
  source: /note="Description of Artificial Sequence: Synthetic oligonucleotide"
acatggagcgcaacacaagga

SEQ ID NO: 41157 - DNA, 21 bp, Artificial Sequence
  source: /note="Description of Artificial Sequence: Synthetic oligonucleotide"
acatggagcagcggaacagac

SEQ ID NO: 41158 - DNA, 21 bp, Artificial Sequence
  source: /note="Description of Artificial Sequence: Synthetic oligonucleotide"
acatggagcacaaacgtcagc

SEQ ID NO: 41159 - DNA, 21 bp, Artificial Sequence
  source: /note="Description of Artificial Sequence: Synthetic oligonucleotide"
acatacgcaatcatcccagac

SEQ ID NO: 41160 - DNA, 21 bp, Artificial Sequence
  source: /note="Description of Artificial Sequence: Synthetic oligonucleotide"
acatacgcaaacagcgcattc

SEQ ID NO: 41161 - DNA, 21 bp, Artificial Sequence
  source: /note="Description of Artificial Sequence: Synthetic oligonucleotide"
acatacgcaaacgtcagcagc

SEQ ID NO: 41162 - DNA, 21 bp, Artificial Sequence
  source: /note="Description of Artificial Sequence: Synthetic oligonucleotide"
acatacgcaccaagcagagga

SEQ ID NO: 41163 - DNA, 21 bp, Artificial Sequence
  source: /note="Description of Artificial Sequence: Synthetic oligonucleotide"
acatacgcaccagtcgaaaca

SEQ ID NO: 41164 - DNA, 21 bp, Artificial Sequence
  source: /note="Description of Artificial Sequence: Synthetic oligonucleotide"
acatacgcaagaagccaagca

SEQ ID NO: 41165 - DNA, 21 bp, Artificial Sequence
  source: /note="Description of Artificial Sequence: Synthetic oligonucleotide"
acatacgaagcaagacaactc

SEQ ID NO: 41166 - DNA, 21 bp, Artificial Sequence
  source: /note="Description of Artificial Sequence: Synthetic oligonucleotide"
acatacgaaggaagactcaga

SEQ ID NO: 41167 - DNA, 21 bp, Artificial Sequence
  source: /note="Description of Artificial Sequence: Synthetic oligonucleotide"
acatacgaactcagcccacca

SEQ ID NO: 41168 - DNA, 21 bp, Artificial Sequence
  source: /note="Description of Artificial Sequence: Synthetic oligonucleotide"
acatacgaagtcagacaactc

SEQ ID NO: 41169 - DNA, 21 bp, Artificial Sequence
  source: /note="Description of Artificial Sequence: Synthetic oligonucleotide"
acatacggagcagcagtccaa

SEQ ID NO: 41170 - DNA, 21 bp, Artificial Sequence
  source: /note="Description of Artificial Sequence: Synthetic oligonucleotide"
acatacggaggaccaatgatc

SEQ ID NO: 41171 - DNA, 21 bp, Artificial Sequence
  source: /note="Description of Artificial Sequence: Synthetic oligonucleotide"
acatacggaatccaagcacca

SEQ ID NO: 41172 - DNA, 21 bp, Artificial Sequence
  source: /note="Description of Artificial Sequence: Synthetic oligonucleotide"
acatacggactcagcgtccca

SEQ ID NO: 41173 - DNA, 21 bp, Artificial Sequence
  source: /note="Description of Artificial Sequence: Synthetic oligonucleotide"
acatacggaatgacaggagca

SEQ ID NO: 41174 - DNA, 21 bp, Artificial Sequence
  source: /note="Description of Artificial Sequence: Synthetic oligonucleotide"
acataccacacaggagacgga

SEQ ID NO: 41175 - DNA, 21 bp, Artificial Sequence
  source: /note="Description of Artificial Sequence: Synthetic oligonucleotide"
acatacatcaacacaaaccca

SEQ ID NO: 41176 - DNA, 21 bp, Artificial Sequence
  source: /note="Description of Artificial Sequence: Synthetic oligonucleotide"
acatacaaagacgaacaacca

SEQ ID NO: 41177 - DNA, 21 bp, Artificial Sequence
  source: /note="Description of Artificial Sequence: Synthetic oligonucleotide"
acatacaaaggagcaccacca

SEQ ID NO: 41178 - DNA, 21 bp, Artificial Sequence
  source: /note="Description of Artificial Sequence: Synthetic oligonucleotide"
acatacaaaaaccaaacacac

SEQ ID NO: 41179 - DNA, 21 bp, Artificial Sequence
  source: /note="Description of Artificial Sequence: Synthetic oligonucleotide"
acatacctcatcgcaacacca

SEQ ID NO: 41180 - DNA, 21 bp, Artificial Sequence
  source: /note="Description of Artificial Sequence: Synthetic oligonucleotide"
acatacctcagcggagcatac

SEQ ID NO: 41181 - DNA, 21 bp, Artificial Sequence
  source: /note="Description of Artificial Sequence: Synthetic oligonucleotide"
acatacccactcccaaacgaa

SEQ ID NO: 41182 - DNA, 21 bp, Artificial Sequence
  source: /note="Description of Artificial Sequence: Synthetic oligonucleotide"
acatacccaccagcagcactc

SEQ ID NO: 41183 - DNA, 21 bp, Artificial Sequence
  source: /note="Description of Artificial Sequence: Synthetic oligonucleotide"
acatacccaacagaaccaaga

SEQ ID NO: 41184 - DNA, 21 bp, Artificial Sequence
  source: /note="Description of Artificial Sequence: Synthetic oligonucleotide"
acatacccaacactcctcgac

SEQ ID NO: 41185 - DNA, 21 bp, Artificial Sequence
  source: /note="Description of Artificial Sequence: Synthetic oligonucleotide"
acataccaagcaagcctcatc

SEQ ID NO: 41186 - DNA, 21 bp, Artificial Sequence
  source: /note="Description of Artificial Sequence: Synthetic oligonucleotide"
acataccaaagccaaagcgga

SEQ ID NO: 41187 - DNA, 21 bp, Artificial Sequence
  source: /note="Description of Artificial Sequence: Synthetic oligonucleotide"
acatacagcgcagaaacaatg

SEQ ID NO: 41188 - DNA, 21 bp, Artificial Sequence
  source: /note="Description of Artificial Sequence: Synthetic oligonucleotide"
acatacagcgcagtcctcgca

SEQ ID NO: 41189 - DNA, 21 bp, Artificial Sequence
  source: /note="Description of Artificial Sequence: Synthetic oligonucleotide"
acatacagccacgcaagagca

SEQ ID NO: 41190 - DNA, 21 bp, Artificial Sequence
  source: /note="Description of Artificial Sequence: Synthetic oligonucleotide"
acatacagcccaacagcaaca

SEQ ID NO: 41191 - DNA, 21 bp, Artificial Sequence
  source: /note="Description of Artificial Sequence: Synthetic oligonucleotide"
acatacagcacagcaatctac

SEQ ID NO: 41192 - DNA, 21 bp, Artificial Sequence
  source: /note="Description of Artificial Sequence: Synthetic oligonucleotide"
acatacagcgtcagcctcgca

SEQ ID NO: 41193 - DNA, 21 bp, Artificial Sequence
  source: /note="Description of Artificial Sequence: Synthetic oligonucleotide"
acatacagctacagcagcgca

SEQ ID NO: 41194 - DNA, 21 bp, Artificial Sequence
  source: /note="Description of Artificial Sequence: Synthetic oligonucleotide"
acatacacaggactcgcagca

SEQ ID NO: 41195 - DNA, 21 bp, Artificial Sequence
  source: /note="Description of Artificial Sequence: Synthetic oligonucleotide"
acatacacacaccacagcgtc

SEQ ID NO: 41196 - DNA, 21 bp, Artificial Sequence
  source: /note="Description of Artificial Sequence: Synthetic oligonucleotide"
acatacacaagcacatacgca

SEQ ID NO: 41197 - DNA, 21 bp, Artificial Sequence
  source: /note="Description of Artificial Sequence: Synthetic oligonucleotide"
acatacgtcgacgtcctccac

SEQ ID NO: 41198 - DNA, 21 bp, Artificial Sequence
  source: /note="Description of Artificial Sequence: Synthetic oligonucleotide"
acatacgtcggaagaggagca

SEQ ID NO: 41199 - DNA, 21 bp, Artificial Sequence
  source: /note="Description of Artificial Sequence: Synthetic oligonucleotide"
acatacgtcatgacaccaaaa

SEQ ID NO: 41200 - DNA, 21 bp, Artificial Sequence
  source: /note="Description of Artificial Sequence: Synthetic oligonucleotide"
acatactacgcagcagaaatc

SEQ ID NO: 41201 - DNA, 21 bp, Artificial Sequence
  source: /note="Description of Artificial Sequence: Synthetic oligonucleotide"
acatactacaaaaacacagga

SEQ ID NO: 41202 - DNA, 21 bp, Artificial Sequence
  source: /note="Description of Artificial Sequence: Synthetic oligonucleotide"
gtcgcagcaggacaaagccca

SEQ ID NO: 41203 - DNA, 21 bp, Artificial Sequence
  source: /note="Description of Artificial Sequence: Synthetic oligonucleotide"
gtcgcagcaagaagcgcacaa

SEQ ID NO: 41204 - DNA, 21 bp, Artificial Sequence
  source: /note="Description of Artificial Sequence: Synthetic oligonucleotide"
gtcgcagacgcaacaaaacca

SEQ ID NO: 41205 - DNA, 21 bp, Artificial Sequence
  source: /note="Description of Artificial Sequence: Synthetic oligonucleotide"
gtcgcagacttcgtcagatgc

SEQ ID NO: 41206 - DNA, 21 bp, Artificial Sequence
  source: /note="Description of Artificial Sequence: Synthetic oligonucleotide"
gtcgcagacaaagcactcgtc

SEQ ID NO: 41207 - DNA, 21 bp, Artificial Sequence
  source: /note="Description of Artificial Sequence: Synthetic oligonucleotide"
gtcgcagacctcagaccagaa

SEQ ID NO: 41208 - DNA, 21 bp, Artificial Sequence
  source: /note="Description of Artificial Sequence: Synthetic oligonucleotide"
gtcgcagacccaccaagaagc

SEQ ID NO: 41209 - DNA, 21 bp, Artificial Sequence
  source: /note="Description of Artificial Sequence: Synthetic oligonucleotide"
gtcgcagacagactcacaaca

SEQ ID NO: 41210 - DNA, 21 bp, Artificial Sequence
  source: /note="Description of Artificial Sequence: Synthetic oligonucleotide"
gtcgcagaacacccaaaaaga

SEQ ID NO: 41211 - DNA, 21 bp, Artificial Sequence
  source: /note="Description of Artificial Sequence: Synthetic oligonucleotide"
gtcgcagaacaacacagcctc

SEQ ID NO: 41212 - DNA, 21 bp, Artificial Sequence
  source: /note="Description of Artificial Sequence: Synthetic oligonucleotide"
gtcgcaggagcaggaacaaca

SEQ ID NO: 41213 - DNA, 21 bp, Artificial Sequence
  source: /note="Description of Artificial Sequence: Synthetic oligonucleotide"
gtcgcaggagcacacgcaaca

SEQ ID NO: 41214 - DNA, 21 bp, Artificial Sequence
  source: /note="Description of Artificial Sequence: Synthetic oligonucleotide"
gtcgcaggagacgcaaaaaac

SEQ ID NO: 41215 - DNA, 21 bp, Artificial Sequence
  source: /note="Description of Artificial Sequence: Synthetic oligonucleotide"
gtcgcaggaatcagaagccaa

SEQ ID NO: 41216 - DNA, 21 bp, Artificial Sequence
  source: /note="Description of Artificial Sequence: Synthetic oligonucleotide"
gtcgcaggactcaaccacaga

SEQ ID NO: 41217 - DNA, 21 bp, Artificial Sequence
  source: /note="Description of Artificial Sequence: Synthetic oligonucleotide"
gtcgcaggaccaacaggacca

SEQ ID NO: 41218 - DNA, 21 bp, Artificial Sequence
  source: /note="Description of Artificial Sequence: Synthetic oligonucleotide"
gtcgcaggacaaagaagcgga

SEQ ID NO: 41219 - DNA, 21 bp, Artificial Sequence
  source: /note="Description of Artificial Sequence: Synthetic oligonucleotide"
gtcgcaggacaaagcccacca

SEQ ID NO: 41220 - DNA, 21 bp, Artificial Sequence
  source: /note="Description of Artificial Sequence: Synthetic oligonucleotide"
gtcgcaggaagagaccaacca

SEQ ID NO: 41221 - DNA, 21 bp, Artificial Sequence
  source: /note="Description of Artificial Sequence: Synthetic oligonucleotide"
gtcgcaggaagagacgtcaga

SEQ ID NO: 41222 - DNA, 21 bp, Artificial Sequence
  source: /note="Description of Artificial Sequence: Synthetic oligonucleotide"
gtcgcaggaagagactaccaa

SEQ ID NO: 41223 - DNA, 21 bp, Artificial Sequence
  source: /note="Description of Artificial Sequence: Synthetic oligonucleotide"
gtcgcaggaagcgcaacagtc

SEQ ID NO: 41224 - DNA, 21 bp, Artificial Sequence
  source: /note="Description of Artificial Sequence: Synthetic oligonucleotide"
gtcgcaggaacagtcgaaaga

SEQ ID NO: 41225 - DNA, 21 bp, Artificial Sequence
  source: /note="Description of Artificial Sequence: Synthetic oligonucleotide"
gtcgcaggagtcagaacagca

SEQ ID NO: 41226 - DNA, 21 bp, Artificial Sequence
  source: /note="Description of Artificial Sequence: Synthetic oligonucleotide"
gtcgcaggagtcagcgaaatg

SEQ ID NO: 41227 - DNA, 21 bp, Artificial Sequence
  source: /note="Description of Artificial Sequence: Synthetic oligonucleotide"
gtcgcacacctcagcatgagc

SEQ ID NO: 41228 - DNA, 21 bp, Artificial Sequence
  source: /note="Description of Artificial Sequence: Synthetic oligonucleotide"
gtcgcacacagcctcccagca

SEQ ID NO: 41229 - DNA, 21 bp, Artificial Sequence
  source: /note="Description of Artificial Sequence: Synthetic oligonucleotide"
gtcgcacacagcacaaacgca

SEQ ID NO: 41230 - DNA, 21 bp, Artificial Sequence
  source: /note="Description of Artificial Sequence: Synthetic oligonucleotide"
gtcgcacacacaggagcaaga

SEQ ID NO: 41231 - DNA, 21 bp, Artificial Sequence
  source: /note="Description of Artificial Sequence: Synthetic oligonucleotide"
gtcgcacacacagtctacagc

SEQ ID NO: 41232 - DNA, 21 bp, Artificial Sequence
  source: /note="Description of Artificial Sequence: Synthetic oligonucleotide"
gtcgcacacgtccaaagcgac

SEQ ID NO: 41233 - DNA, 21 bp, Artificial Sequence
  source: /note="Description of Artificial Sequence: Synthetic oligonucleotide"
gtcgcacactacccagcaagc

SEQ ID NO: 41234 - DNA, 21 bp, Artificial Sequence
  source: /note="Description of Artificial Sequence: Synthetic oligonucleotide"
gtcgcaatccacggagcagtc

SEQ ID NO: 41235 - DNA, 21 bp, Artificial Sequence
  source: /note="Description of Artificial Sequence: Synthetic oligonucleotide"
gtcgcaatcccaagaggaagc

SEQ ID NO: 41236 - DNA, 21 bp, Artificial Sequence
  source: /note="Description of Artificial Sequence: Synthetic oligonucleotide"
gtcgcaatcagaagcccagca

SEQ ID NO: 41237 - DNA, 21 bp, Artificial Sequence
  source: /note="Description of Artificial Sequence: Synthetic oligonucleotide"
gtcgcactcgcaggacaatac

SEQ ID NO: 41238 - DNA, 21 bp, Artificial Sequence
  source: /note="Description of Artificial Sequence: Synthetic oligonucleotide"
gtcgcactccacccactcaac

SEQ ID NO: 41239 - DNA, 21 bp, Artificial Sequence
  source: /note="Description of Artificial Sequence: Synthetic oligonucleotide"
gtcgcactcatcaaatacagc

SEQ ID NO: 41240 - DNA, 21 bp, Artificial Sequence
  source: /note="Description of Artificial Sequence: Synthetic oligonucleotide"
gtcgcactcagcgcagcaaaa

SEQ ID NO: 41241 - DNA, 21 bp, Artificial Sequence
  source: /note="Description of Artificial Sequence: Synthetic oligonucleotide"
gtcgcaaacgaaacacactac

SEQ ID NO: 41242 - DNA, 21 bp, Artificial Sequence
  source: /note="Description of Artificial Sequence: Synthetic oligonucleotide"
gtcgcaaacggaaaaagccac

SEQ ID NO: 41243 - DNA, 21 bp, Artificial Sequence
  source: /note="Description of Artificial Sequence: Synthetic oligonucleotide"
gtcgcaaaccacatcgaagtc

SEQ ID NO: 41244 - DNA, 21 bp, Artificial Sequence
  source: /note="Description of Artificial Sequence: Synthetic oligonucleotide"
gtcgcaaaccaacaaggaaca

SEQ ID NO: 41245 - DNA, 21 bp, Artificial Sequence
  source: /note="Description of Artificial Sequence: Synthetic oligonucleotide"
gtcgcaaacagagacgtccaa

SEQ ID NO: 41246 - DNA, 21 bp, Artificial Sequence
  source: /note="Description of Artificial Sequence: Synthetic oligonucleotide"
gtcgcaaacgtcctcacaaac

SEQ ID NO: 41247 - DNA, 21 bp, Artificial Sequence
  source: /note="Description of Artificial Sequence: Synthetic oligonucleotide"
gtcgcaccagcaatcccagga

SEQ ID NO: 41248 - DNA, 21 bp, Artificial Sequence
  source: /note="Description of Artificial Sequence: Synthetic oligonucleotide"
gtcgcaccaatcggaagcgaa

SEQ ID NO: 41249 - DNA, 21 bp, Artificial Sequence
  source: /note="Description of Artificial Sequence: Synthetic oligonucleotide"
gtcgcaccactcatcccaaaa

SEQ ID NO: 41250 - DNA, 21 bp, Artificial Sequence
  source: /note="Description of Artificial Sequence: Synthetic oligonucleotide"
gtcgcaccaccaccacaaaaa

SEQ ID NO: 41251 - DNA, 21 bp, Artificial Sequence
  source: /note="Description of Artificial Sequence: Synthetic oligonucleotide"
gtcgcaccaccaccaagacac

SEQ ID NO: 41252 - DNA, 21 bp, Artificial Sequence
  source: /note="Description of Artificial Sequence: Synthetic oligonucleotide"
gtcgcaccaccatacagcgga

SEQ ID NO: 41253 - DNA, 21 bp, Artificial Sequence
  source: /note="Description of Artificial Sequence: Synthetic oligonucleotide"
gtcgcaccaagcgaaggaagc

SEQ ID NO: 41254 - DNA, 21 bp, Artificial Sequence
  source: /note="Description of Artificial Sequence: Synthetic oligonucleotide"
gtcgcaccaagccaaagactc

SEQ ID NO: 41255 - DNA, 21 bp, Artificial Sequence
  source: /note="Description of Artificial Sequence: Synthetic oligonucleotide"
gtcgcacaaagaagcggacca

SEQ ID NO: 41256 - DNA, 21 bp, Artificial Sequence
  source: /note="Description of Artificial Sequence: Synthetic oligonucleotide"
gtcgcacaaagcagaagcatc

SEQ ID NO: 41257 - DNA, 21 bp, Artificial Sequence
  source: /note="Description of Artificial Sequence: Synthetic oligonucleotide"
gtcgcaagagcacacatcgtc

SEQ ID NO: 41258 - DNA, 21 bp, Artificial Sequence
  source: /note="Description of Artificial Sequence: Synthetic oligonucleotide"
gtcgcaagaggaccaacaaca

SEQ ID NO: 41259 - DNA, 21 bp, Artificial Sequence
  source: /note="Description of Artificial Sequence: Synthetic oligonucleotide"
gtcgcaagacacagcaacgaa

SEQ ID NO: 41260 - DNA, 21 bp, Artificial Sequence
  source: /note="Description of Artificial Sequence: Synthetic oligonucleotide"
gtcgcaagaatcgacggaatg

SEQ ID NO: 41261 - DNA, 21 bp, Artificial Sequence
  source: /note="Description of Artificial Sequence: Synthetic oligonucleotide"
gtcgcaagactcccacaagtc

SEQ ID NO: 41262 - DNA, 21 bp, Artificial Sequence
  source: /note="Description of Artificial Sequence: Synthetic oligonucleotide"
gtcgcaagaccactcagcatg

SEQ ID NO: 41263 - DNA, 21 bp, Artificial Sequence
  source: /note="Description of Artificial Sequence: Synthetic oligonucleotide"
gtcgcaagaagcggaacaaca

SEQ ID NO: 41264 - DNA, 21 bp, Artificial Sequence
  source: /note="Description of Artificial Sequence: Synthetic oligonucleotide"
gtcgcaagaagcctccaagca

SEQ ID NO: 41265 - DNA, 21 bp, Artificial Sequence
  source: /note="Description of Artificial Sequence: Synthetic oligonucleotide"
gtcgcaagaagcaacctcgac

SEQ ID NO: 41266 - DNA, 21 bp, Artificial Sequence
  source: /note="Description of Artificial Sequence: Synthetic oligonucleotide"
gtcgcaagcgcactcggagga

SEQ ID NO: 41267 - DNA, 21 bp, Artificial Sequence
  source: /note="Description of Artificial Sequence: Synthetic oligonucleotide"
gtcgcaagcgcaagcccagca

SEQ ID NO: 41268 - DNA, 21 bp, Artificial Sequence
  source: /note="Description of Artificial Sequence: Synthetic oligonucleotide"
gtcgcaagcggagtcgtcttc

SEQ ID NO: 41269 - DNA, 21 bp, Artificial Sequence
  source: /note="Description of Artificial Sequence: Synthetic oligonucleotide"
gtcgcaagccacatcacacca

SEQ ID NO: 41270 - DNA, 21 bp, Artificial Sequence
  source: /note="Description of Artificial Sequence: Synthetic oligonucleotide"
gtcgcaagcaaaatcatcgac

SEQ ID NO: 41271 - DNA, 21 bp, Artificial Sequence
  source: /note="Description of Artificial Sequence: Synthetic oligonucleotide"
gtcgcaagcctccaagtcgga

SEQ ID NO: 41272 - DNA, 21 bp, Artificial Sequence
  source: /note="Description of Artificial Sequence: Synthetic oligonucleotide"
gtcgcaagcctcacacacgac

SEQ ID NO: 41273 - DNA, 21 bp, Artificial Sequence
  source: /note="Description of Artificial Sequence: Synthetic oligonucleotide"
gtcgcaagcaacaacaaagca

SEQ ID NO: 41274 - DNA, 21 bp, Artificial Sequence
  source: /note="Description of Artificial Sequence: Synthetic oligonucleotide"
gtcgcaagcagagcaccaaca

SEQ ID NO: 41275 - DNA, 21 bp, Artificial Sequence
  source: /note="Description of Artificial Sequence: Synthetic oligonucleotide"
gtcgcaagcagcaaaacacca

SEQ ID NO: 41276 - DNA, 21 bp, Artificial Sequence
  source: /note="Description of Artificial Sequence: Synthetic oligonucleotide"
gtcgcaagcagcagcggaatc

SEQ ID NO: 41277 - DNA, 21 bp, Artificial Sequence
  source: /note="Description of Artificial Sequence: Synthetic oligonucleotide"
gtcgcaagcacaggaagccca

SEQ ID NO: 41278 - DNA, 21 bp, Artificial Sequence
  source: /note="Description of Artificial Sequence: Synthetic oligonucleotide"
gtcgcaagcgtcaaaatgctc

SEQ ID NO: 41279 - DNA, 21 bp, Artificial Sequence
  source: /note="Description of Artificial Sequence: Synthetic oligonucleotide"
gtcgcaagcgtcagaacaaac

SEQ ID NO: 41280 - DNA, 21 bp, Artificial Sequence
  source: /note="Description of Artificial Sequence: Synthetic oligonucleotide"
gtcgcaagctacagcggattc

SEQ ID NO: 41281 - DNA, 21 bp, Artificial Sequence
  source: /note="Description of Artificial Sequence: Synthetic oligonucleotide"
gtcgcaagctacagcagagaa

SEQ ID NO: 41282 - DNA, 21 bp, Artificial Sequence
  source: /note="Description of Artificial Sequence: Synthetic oligonucleotide"
gtcgcaacagcaagcgtcaca

SEQ ID NO: 41283 - DNA, 21 bp, Artificial Sequence
  source: /note="Description of Artificial Sequence: Synthetic oligonucleotide"
gtcgcaacagaactcgcagga

SEQ ID NO: 41284 - DNA, 21 bp, Artificial Sequence
  source: /note="Description of Artificial Sequence: Synthetic oligonucleotide"
gtcgcaacactcaactacgtc

SEQ ID NO: 41285 - DNA, 21 bp, Artificial Sequence
  source: /note="Description of Artificial Sequence: Synthetic oligonucleotide"
gtcgcaacactcagaggaaac

SEQ ID NO: 41286 - DNA, 21 bp, Artificial Sequence
  source: /note="Description of Artificial Sequence: Synthetic oligonucleotide"
gtcgcaacaatggtcgtccca

SEQ ID NO: 41287 - DNA, 21 bp, Artificial Sequence
  source: /note="Description of Artificial Sequence: Synthetic oligonucleotide"
gtcgcaacaaacaacgacgtc

SEQ ID NO: 41288 - DNA, 21 bp, Artificial Sequence
  source: /note="Description of Artificial Sequence: Synthetic oligonucleotide"
gtcgcaacaaacagcatcagc

SEQ ID NO: 41289 - DNA, 21 bp, Artificial Sequence
  source: /note="Description of Artificial Sequence: Synthetic oligonucleotide"
gtcgcaacaaacacatacctc

SEQ ID NO: 41290 - DNA, 21 bp, Artificial Sequence
  source: /note="Description of Artificial Sequence: Synthetic oligonucleotide"
gtcgcaacaccaacagtcctc

SEQ ID NO: 41291 - DNA, 21 bp, Artificial Sequence
  source: /note="Description of Artificial Sequence: Synthetic oligonucleotide"
gtcgcaacaagagacagctac

SEQ ID NO: 41292 - DNA, 21 bp, Artificial Sequence
  source: /note="Description of Artificial Sequence: Synthetic oligonucleotide"
gtcgcaacaagagtcgtcgaa

SEQ ID NO: 41293 - DNA, 21 bp, Artificial Sequence
  source: /note="Description of Artificial Sequence: Synthetic oligonucleotide"
gtcgcaacaagcgtcagacca

SEQ ID NO: 41294 - DNA, 21 bp, Artificial Sequence
  source: /note="Description of Artificial Sequence: Synthetic oligonucleotide"
gtcgcagtcatgatgccaagc

SEQ ID NO: 41295 - DNA, 21 bp, Artificial Sequence
  source: /note="Description of Artificial Sequence: Synthetic oligonucleotide"
gtcgcagtcaacagcagaagc

SEQ ID NO: 41296 - DNA, 21 bp, Artificial Sequence
  source: /note="Description of Artificial Sequence: Synthetic oligonucleotide"
gtcgcagtcagaacaagcgac

SEQ ID NO: 41297 - DNA, 21 bp, Artificial Sequence
  source: /note="Description of Artificial Sequence: Synthetic oligonucleotide"
gtcgcagtcagcgcaccactc

SEQ ID NO: 41298 - DNA, 21 bp, Artificial Sequence
  source: /note="Description of Artificial Sequence: Synthetic oligonucleotide"
gtcgcagtcagcacagtcaca

SEQ ID NO: 41299 - DNA, 21 bp, Artificial Sequence
  source: /note="Description of Artificial Sequence: Synthetic oligonucleotide"
gtcgcatacgacacagcagtc

SEQ ID NO: 41300 - DNA, 21 bp, Artificial Sequence
  source: /note="Description of Artificial Sequence: Synthetic oligonucleotide"
gtcgcatacccagcaagaagc

SEQ ID NO: 41301 - DNA, 21 bp, Artificial Sequence
  source: /note="Description of Artificial Sequence: Synthetic oligonucleotide"
gtctgcggaccaccattccac

SEQ ID NO: 41302 - DNA, 21 bp, Artificial Sequence
  source: /note="Description of Artificial Sequence: Synthetic oligonucleotide"
gtctgcaacagcgtcggatac

SEQ ID NO: 41303 - DNA, 21 bp, Artificial Sequence
  source: /note="Description of Artificial Sequence: Synthetic oligonucleotide"
gtcgacgcaaaagcaaacgac

SEQ ID NO: 41304 - DNA, 21 bp, Artificial Sequence
  source: /note="Description of Artificial Sequence: Synthetic oligonucleotide"
gtcgacgacttcccaagatgc

SEQ ID NO: 41305 - DNA, 21 bp, Artificial Sequence
  source: /note="Description of Artificial Sequence: Synthetic oligonucleotide"
gtcgacgacctcagagcaaga

SEQ ID NO: 41306 - DNA, 21 bp, Artificial Sequence
  source: /note="Description of Artificial Sequence: Synthetic oligonucleotide"
gtcgacgaaatcagaagacca

SEQ ID NO: 41307 - DNA, 21 bp, Artificial Sequence
  source: /note="Description of Artificial Sequence: Synthetic oligonucleotide"
gtcgacttcgaacacagccaa

SEQ ID NO: 41308 - DNA, 21 bp, Artificial Sequence
  source: /note="Description of Artificial Sequence: Synthetic oligonucleotide"
gtcgacggagcaagacaacca

SEQ ID NO: 41309 - DNA, 21 bp, Artificial Sequence
  source: /note="Description of Artificial Sequence: Synthetic oligonucleotide"
gtcgacggactcggaagcaaa

SEQ ID NO: 41310 - DNA, 21 bp, Artificial Sequence
  source: /note="Description of Artificial Sequence: Synthetic oligonucleotide"
gtcgacggagtcagaggagca

SEQ ID NO: 41311 - DNA, 21 bp, Artificial Sequence
  source: /note="Description of Artificial Sequence: Synthetic oligonucleotide"
gtcgacaaactcagccacaca

SEQ ID NO: 41312 - DNA, 21 bp, Artificial Sequence
  source: /note="Description of Artificial Sequence: Synthetic oligonucleotide"
gtcgacaaaccacacctcgca

SEQ ID NO: 41313 - DNA, 21 bp, Artificial Sequence
  source: /note="Description of Artificial Sequence: Synthetic oligonucleotide"
gtcgacctccaatgcgcacca

SEQ ID NO: 41314 - DNA, 21 bp, Artificial Sequence
  source: /note="Description of Artificial Sequence: Synthetic oligonucleotide"
gtcgacctcagaccatacgca

SEQ ID NO: 41315 - DNA, 21 bp, Artificial Sequence
  source: /note="Description of Artificial Sequence: Synthetic oligonucleotide"
gtcgacaacgcagcacaaagc

SEQ ID NO: 41316 - DNA, 21 bp, Artificial Sequence
  source: /note="Description of Artificial Sequence: Synthetic oligonucleotide"
gtcgacaacctcgcaagagca

SEQ ID NO: 41317 - DNA, 21 bp, Artificial Sequence
  source: /note="Description of Artificial Sequence: Synthetic oligonucleotide"
gtcgacaacacactcacagac

SEQ ID NO: 41318 - DNA, 21 bp, Artificial Sequence
  source: /note="Description of Artificial Sequence: Synthetic oligonucleotide"
gtcgacccaggaagacaccac

SEQ ID NO: 41319 - DNA, 21 bp, Artificial Sequence
  source: /note="Description of Artificial Sequence: Synthetic oligonucleotide"
gtcgacccaatgccagcactc

SEQ ID NO: 41320 - DNA, 21 bp, Artificial Sequence
  source: /note="Description of Artificial Sequence: Synthetic oligonucleotide"
gtcgacccaagatggcaccca

SEQ ID NO: 41321 - DNA, 21 bp, Artificial Sequence
  source: /note="Description of Artificial Sequence: Synthetic oligonucleotide"
gtcgaccaacacacaatcgca

SEQ ID NO: 41322 - DNA, 21 bp, Artificial Sequence
  source: /note="Description of Artificial Sequence: Synthetic oligonucleotide"
gtcgaccaagtcaacaaccca

SEQ ID NO: 41323 - DNA, 21 bp, Artificial Sequence
  source: /note="Description of Artificial Sequence: Synthetic oligonucleotide"
gtcgacagacaccacagccca

SEQ ID NO: 41324 - DNA, 21 bp, Artificial Sequence
  source: /note="Description of Artificial Sequence: Synthetic oligonucleotide"
gtcgacagaagaccagacagc

SEQ ID NO: 41325 - DNA, 21 bp, Artificial Sequence
  source: /note="Description of Artificial Sequence: Synthetic oligonucleotide"
gtcgacagaagaacaacaaca

SEQ ID NO: 41326 - DNA, 21 bp, Artificial Sequence
  source: /note="Description of Artificial Sequence: Synthetic oligonucleotide"
gtcgacagcctcacaccatac

SEQ ID NO: 41327 - DNA, 21 bp, Artificial Sequence
  source: /note="Description of Artificial Sequence: Synthetic oligonucleotide"
gtcgacagcccaagcgcacca

SEQ ID NO: 41328 - DNA, 21 bp, Artificial Sequence
  source: /note="Description of Artificial Sequence: Synthetic oligonucleotide"
gtcgacagcagcacaaacctc

SEQ ID NO: 41329 - DNA, 21 bp, Artificial Sequence
  source: /note="Description of Artificial Sequence: Synthetic oligonucleotide"
gtcgacacactcatgaacaga

SEQ ID NO: 41330 - DNA, 21 bp, Artificial Sequence
  source: /note="Description of Artificial Sequence: Synthetic oligonucleotide"
gtcgacacaccaggaaacaga

SEQ ID NO: 41331 - DNA, 21 bp, Artificial Sequence
  source: /note="Description of Artificial Sequence: Synthetic oligonucleotide"
gtcgacacaagaagagaaagc

SEQ ID NO: 41332 - DNA, 21 bp, Artificial Sequence
  source: /note="Description of Artificial Sequence: Synthetic oligonucleotide"
gtcgacacaagcctcgaatgc

SEQ ID NO: 41333 - DNA, 21 bp, Artificial Sequence
  source: /note="Description of Artificial Sequence: Synthetic oligonucleotide"
gtcgacacaacaaaattccaa

SEQ ID NO: 41334 - DNA, 21 bp, Artificial Sequence
  source: /note="Description of Artificial Sequence: Synthetic oligonucleotide"
gtcgacgtcagaaaacaccca

SEQ ID NO: 41335 - DNA, 21 bp, Artificial Sequence
  source: /note="Description of Artificial Sequence: Synthetic oligonucleotide"
gtcgactacgcagtcagcatg

SEQ ID NO: 41336 - DNA, 21 bp, Artificial Sequence
  source: /note="Description of Artificial Sequence: Synthetic oligonucleotide"
gtcgaagcaacaagcagagtc

SEQ ID NO: 41337 - DNA, 21 bp, Artificial Sequence
  source: /note="Description of Artificial Sequence: Synthetic oligonucleotide"
gtcgaaggagtcagaagcgca

SEQ ID NO: 41338 - DNA, 21 bp, Artificial Sequence
  source: /note="Description of Artificial Sequence: Synthetic oligonucleotide"
gtcgaacacaacagcctcaac

SEQ ID NO: 41339 - DNA, 21 bp, Artificial Sequence
  source: /note="Description of Artificial Sequence: Synthetic oligonucleotide"
gtcgaacacaacacaccattc

SEQ ID NO: 41340 - DNA, 21 bp, Artificial Sequence
  source: /note="Description of Artificial Sequence: Synthetic oligonucleotide"
gtcgaacacagagtcagcaca

SEQ ID NO: 41341 - DNA, 21 bp, Artificial Sequence
  source: /note="Description of Artificial Sequence: Synthetic oligonucleotide"
gtcgaacacagcacaaacgtc

SEQ ID NO: 41342 - DNA, 21 bp, Artificial Sequence
  source: /note="Description of Artificial Sequence: Synthetic oligonucleotide"
gtcgaaatcaaaacaagaagc

SEQ ID NO: 41343 - DNA, 21 bp, Artificial Sequence
  source: /note="Description of Artificial Sequence: Synthetic oligonucleotide"
gtcgaaatcagcagcgtcagc

SEQ ID NO: 41344 - DNA, 21 bp, Artificial Sequence
  source: /note="Description of Artificial Sequence: Synthetic oligonucleotide"
gtcgaaaaagaaatgaacagc

SEQ ID NO: 41345 - DNA, 21 bp, Artificial Sequence
  source: /note="Description of Artificial Sequence: Synthetic oligonucleotide"
gtcgaaaaaacaccaatggaa

SEQ ID NO: 41346 - DNA, 21 bp, Artificial Sequence
  source: /note="Description of Artificial Sequence: Synthetic oligonucleotide"
gtcgaaaaagtcagcatgctc

SEQ ID NO: 41347 - DNA, 21 bp, Artificial Sequence
  source: /note="Description of Artificial Sequence: Synthetic oligonucleotide"
gtcgaaaaatacaaaaacctc

SEQ ID NO: 41348 - DNA, 21 bp, Artificial Sequence
  source: /note="Description of Artificial Sequence: Synthetic oligonucleotide"
gtcgaactcaaccaaggagac

SEQ ID NO: 41349 - DNA, 21 bp, Artificial Sequence
  source: /note="Description of Artificial Sequence: Synthetic oligonucleotide"
gtcgaaaacgcaagaccacaa

SEQ ID NO: 41350 - DNA, 21 bp, Artificial Sequence
  source: /note="Description of Artificial Sequence: Synthetic oligonucleotide"
gtcgaaccagcattcacagac

SEQ ID NO: 41351 - DNA, 21 bp, Artificial Sequence
  source: /note="Description of Artificial Sequence: Synthetic oligonucleotide"
gtcgaaccaagaaaaagcgca

SEQ ID NO: 41352 - DNA, 21 bp, Artificial Sequence
  source: /note="Description of Artificial Sequence: Synthetic oligonucleotide"
gtcgaaccaagaagcatgtac

SEQ ID NO: 41353 - DNA, 21 bp, Artificial Sequence
  source: /note="Description of Artificial Sequence: Synthetic oligonucleotide"
gtcgaaccaacactcacaaga

SEQ ID NO: 41354 - DNA, 21 bp, Artificial Sequence
  source: /note="Description of Artificial Sequence: Synthetic oligonucleotide"
gtcgaaccagtcctccacaca

SEQ ID NO: 41355 - DNA, 21 bp, Artificial Sequence
  source: /note="Description of Artificial Sequence: Synthetic oligonucleotide"
gtcgaaagagacgacagaaca

SEQ ID NO: 41356 - DNA, 21 bp, Artificial Sequence
  source: /note="Description of Artificial Sequence: Synthetic oligonucleotide"
gtcgaaagagacatcgacagc

SEQ ID NO: 41357 - DNA, 21 bp, Artificial Sequence
  source: /note="Description of Artificial Sequence: Synthetic oligonucleotide"
gtcgaaagaccagtcaacaaa

SEQ ID NO: 41358 - DNA, 21 bp, Artificial Sequence
  source: /note="Description of Artificial Sequence: Synthetic oligonucleotide"
gtcgaaagagtcagaacactc

SEQ ID NO: 41359 - DNA, 21 bp, Artificial Sequence
  source: /note="Description of Artificial Sequence: Synthetic oligonucleotide"
gtcgaaagcgacacaagctgg

SEQ ID NO: 41360 - DNA, 21 bp, Artificial Sequence
  source: /note="Description of Artificial Sequence: Synthetic oligonucleotide"
gtcgaaagcaacagcccaatg

SEQ ID NO: 41361 - DNA, 21 bp, Artificial Sequence
  source: /note="Description of Artificial Sequence: Synthetic oligonucleotide"
gtcgaaagcaacagcagcttc

SEQ ID NO: 41362 - DNA, 21 bp, Artificial Sequence
  source: /note="Description of Artificial Sequence: Synthetic oligonucleotide"
gtcgaaagcagcccactccca

SEQ ID NO: 41363 - DNA, 21 bp, Artificial Sequence
  source: /note="Description of Artificial Sequence: Synthetic oligonucleotide"
gtcgaaacaggacacaacaaa

SEQ ID NO: 41364 - DNA, 21 bp, Artificial Sequence
  source: /note="Description of Artificial Sequence: Synthetic oligonucleotide"
gtcgaaacaaacagaaacaga

SEQ ID NO: 41365 - DNA, 21 bp, Artificial Sequence
  source: /note="Description of Artificial Sequence: Synthetic oligonucleotide"
gtcgaaacaaacgtcaaactc

SEQ ID NO: 41366 - DNA, 21 bp, Artificial Sequence
  source: /note="Description of Artificial Sequence: Synthetic oligonucleotide"
gtcgaaacaccactcagaaaa

SEQ ID NO: 41367 - DNA, 21 bp, Artificial Sequence
  source: /note="Description of Artificial Sequence: Synthetic oligonucleotide"
gtcgaagtcaacacactccac

SEQ ID NO: 41368 - DNA, 21 bp, Artificial Sequence
  source: /note="Description of Artificial Sequence: Synthetic oligonucleotide"
gtcttcgacaacacagtcaga

SEQ ID NO: 41369 - DNA, 21 bp, Artificial Sequence
  source: /note="Description of Artificial Sequence: Synthetic oligonucleotide"
gtcttcggagcaaacgtcgca

SEQ ID NO: 41370 - DNA, 21 bp, Artificial Sequence
  source: /note="Description of Artificial Sequence: Synthetic oligonucleotide"
gtcttcggagacacactcctc

SEQ ID NO: 41371 - DNA, 21 bp, Artificial Sequence
  source: /note="Description of Artificial Sequence: Synthetic oligonucleotide"
gtcttcggaatcccaagccca

SEQ ID NO: 41372 - DNA, 21 bp, Artificial Sequence
  source: /note="Description of Artificial Sequence: Synthetic oligonucleotide"
gtcttccacaaaggattcgac

SEQ ID NO: 41373 - DNA, 21 bp, Artificial Sequence
  source: /note="Description of Artificial Sequence: Synthetic oligonucleotide"
gtcttccacaaaagcgaaaca

SEQ ID NO: 41374 - DNA, 21 bp, Artificial Sequence
  source: /note="Description of Artificial Sequence: Synthetic oligonucleotide"
gtcttccacacaccagaacca

SEQ ID NO: 41375 - DNA, 21 bp, Artificial Sequence
  source: /note="Description of Artificial Sequence: Synthetic oligonucleotide"
gtcttcctcgaaccaagcagc

SEQ ID NO: 41376 - DNA, 21 bp, Artificial Sequence
  source: /note="Description of Artificial Sequence: Synthetic oligonucleotide"
gtcttcccacaaagcacacca

SEQ ID NO: 41377 - DNA, 21 bp, Artificial Sequence
  source: /note="Description of Artificial Sequence: Synthetic oligonucleotide"
gtcttccaagacagcatccca

SEQ ID NO: 41378 - DNA, 21 bp, Artificial Sequence
  source: /note="Description of Artificial Sequence: Synthetic oligonucleotide"
gtcttccaaggacaaatcgtc

SEQ ID NO: 41379 - DNA, 21 bp, Artificial Sequence
  source: /note="Description of Artificial Sequence: Synthetic oligonucleotide"
gtcttccaaacaaacaacgca

SEQ ID NO: 41380 - DNA, 21 bp, Artificial Sequence
  source: /note="Description of Artificial Sequence: Synthetic oligonucleotide"
gtcttcagaacaacaagccca

SEQ ID NO: 41381 - DNA, 21 bp, Artificial Sequence
  source: /note="Description of Artificial Sequence: Synthetic oligonucleotide"
gtcttcagcggaagacaagca

SEQ ID NO: 41382 - DNA, 21 bp, Artificial Sequence
  source: /note="Description of Artificial Sequence: Synthetic oligonucleotide"
gtcttcagcaacagcgcagtc

SEQ ID NO: 41383 - DNA, 21 bp, Artificial Sequence
  source: /note="Description of Artificial Sequence: Synthetic oligonucleotide"
gtcttcacacacgaaagaaca

SEQ ID NO: 41384 - DNA, 21 bp, Artificial Sequence
  source: /note="Description of Artificial Sequence: Synthetic oligonucleotide"
gtcttcacacacagcgaccca

SEQ ID NO: 41385 - DNA, 21 bp, Artificial Sequence
  source: /note="Description of Artificial Sequence: Synthetic oligonucleotide"
gtcttcacaaacccaagactc

SEQ ID NO: 41386 - DNA, 21 bp, Artificial Sequence
  source: /note="Description of Artificial Sequence: Synthetic oligonucleotide"
gtcttcacaccagaagaaaga

SEQ ID NO: 41387 - DNA, 21 bp, Artificial Sequence
  source: /note="Description of Artificial Sequence: Synthetic oligonucleotide"
gtcttcacaagcgtcacaaca

SEQ ID NO: 41388 - DNA, 21 bp, Artificial Sequence
  source: /note="Description of Artificial Sequence: Synthetic oligonucleotide"
gtcttcacaacaggaagccca

SEQ ID NO: 41389 - DNA, 21 bp, Artificial Sequence
  source: /note="Description of Artificial Sequence: Synthetic oligonucleotide"
gtcttcgtcggactcaaacca

SEQ ID NO: 41390 - DNA, 21 bp, Artificial Sequence
  source: /note="Description of Artificial Sequence: Synthetic oligonucleotide"
gtcggagcagcaagcgaaaga

SEQ ID NO: 41391 - DNA, 21 bp, Artificial Sequence
  source: /note="Description of Artificial Sequence: Synthetic oligonucleotide"
gtcggagcagacacaagagac

SEQ ID NO: 41392 - DNA, 21 bp, Artificial Sequence
  source: /note="Description of Artificial Sequence: Synthetic oligonucleotide"
gtcggagcaccaaacagaaca

SEQ ID NO: 41393 - DNA, 21 bp, Artificial Sequence
  source: /note="Description of Artificial Sequence: Synthetic oligonucleotide"
gtcggagcaccagtcgaaaga

SEQ ID NO: 41394 - DNA, 21 bp, Artificial Sequence
  source: /note="Description of Artificial Sequence: Synthetic oligonucleotide"
gtcggagcaagagcaccagca

SEQ ID NO: 41395 - DNA, 21 bp, Artificial Sequence
  source: /note="Description of Artificial Sequence: Synthetic oligonucleotide"
gtcggagcaagccacgcaaaa

SEQ ID NO: 41396 - DNA, 21 bp, Artificial Sequence
  source: /note="Description of Artificial Sequence: Synthetic oligonucleotide"
gtcggagcagtctacagccaa

SEQ ID NO: 41397 - DNA, 21 bp, Artificial Sequence
  source: /note="Description of Artificial Sequence: Synthetic oligonucleotide"
gtcggagacgacagcgtcctc

SEQ ID NO: 41398 - DNA, 21 bp, Artificial Sequence
  source: /note="Description of Artificial Sequence: Synthetic oligonucleotide"
gtcggagaaatcatggcaatg

SEQ ID NO: 41399 - DNA, 21 bp, Artificial Sequence
  source: /note="Description of Artificial Sequence: Synthetic oligonucleotide"
gtcggagaaagaagcagcaga

SEQ ID NO: 41400 - DNA, 21 bp, Artificial Sequence
  source: /note="Description of Artificial Sequence: Synthetic oligonucleotide"
gtcggaggagacgacgacatg

SEQ ID NO: 41401 - DNA, 21 bp, Artificial Sequence
  source: /note="Description of Artificial Sequence: Synthetic oligonucleotide"
gtcggaggagacctctgcgac

SEQ ID NO: 41402 - DNA, 21 bp, Artificial Sequence
  source: /note="Description of Artificial Sequence: Synthetic oligonucleotide"
gtcggaggagacagcgtccca

SEQ ID NO: 41403 - DNA, 21 bp, Artificial Sequence
  source: /note="Description of Artificial Sequence: Synthetic oligonucleotide"
gtcggaggaggacacggaaca

SEQ ID NO: 41404 - DNA, 21 bp, Artificial Sequence
  source: /note="Description of Artificial Sequence: Synthetic oligonucleotide"
gtcggaggaggaacaggacca

SEQ ID NO: 41405 - DNA, 21 bp, Artificial Sequence
  source: /note="Description of Artificial Sequence: Synthetic oligonucleotide"
gtcggaggaatggacctcaca

SEQ ID NO: 41406 - DNA, 21 bp, Artificial Sequence
  source: /note="Description of Artificial Sequence: Synthetic oligonucleotide"
gtcggaggaccaatcggatac

SEQ ID NO: 41407 - DNA, 21 bp, Artificial Sequence
  source: /note="Description of Artificial Sequence: Synthetic oligonucleotide"
gtcggacacccactcaaacca

SEQ ID NO: 41408 - DNA, 21 bp, Artificial Sequence
  source: /note="Description of Artificial Sequence: Synthetic oligonucleotide"
gtcggacacagcctcatgcca

SEQ ID NO: 41409 - DNA, 21 bp, Artificial Sequence
  source: /note="Description of Artificial Sequence: Synthetic oligonucleotide"
gtcggacacagcatgccacca

SEQ ID NO: 41410 - DNA, 21 bp, Artificial Sequence
  source: /note="Description of Artificial Sequence: Synthetic oligonucleotide"
gtcggacacagcgtcacactc

SEQ ID NO: 41411 - DNA, 21 bp, Artificial Sequence
  source: /note="Description of Artificial Sequence: Synthetic oligonucleotide"
gtcggaaaagacatgagcgtc

SEQ ID NO: 41412 - DNA, 21 bp, Artificial Sequence
  source: /note="Description of Artificial Sequence: Synthetic oligonucleotide"
gtcggaaaaggagaagcaagc

SEQ ID NO: 41413 - DNA, 21 bp, Artificial Sequence
  source: /note="Description of Artificial Sequence: Synthetic oligonucleotide"
gtcggaaaactcgtcaactgc

SEQ ID NO: 41414 - DNA, 21 bp, Artificial Sequence
  source: /note="Description of Artificial Sequence: Synthetic oligonucleotide"
gtcggactcccaccagcacca

SEQ ID NO: 41415 - DNA, 21 bp, Artificial Sequence
  source: /note="Description of Artificial Sequence: Synthetic oligonucleotide"
gtcggactccaacacaacctc

SEQ ID NO: 41416 - DNA, 21 bp, Artificial Sequence
  source: /note="Description of Artificial Sequence: Synthetic oligonucleotide"
gtcggactcacaagcacagtc

SEQ ID NO: 41417 - DNA, 21 bp, Artificial Sequence
  source: /note="Description of Artificial Sequence: Synthetic oligonucleotide"
gtcggaatgagaatcccagca

SEQ ID NO: 41418 - DNA, 21 bp, Artificial Sequence
  source: /note="Description of Artificial Sequence: Synthetic oligonucleotide"
gtcggaaacaaaggaatcagc

SEQ ID NO: 41419 - DNA, 21 bp, Artificial Sequence
  source: /note="Description of Artificial Sequence: Synthetic oligonucleotide"
gtcggaaacctccaagcattc

SEQ ID NO: 41420 - DNA, 21 bp, Artificial Sequence
  source: /note="Description of Artificial Sequence: Synthetic oligonucleotide"
gtcggaaacagagcattcatc

SEQ ID NO: 41421 - DNA, 21 bp, Artificial Sequence
  source: /note="Description of Artificial Sequence: Synthetic oligonucleotide"
gtcggaaacagcctccacgca

SEQ ID NO: 41422 - DNA, 21 bp, Artificial Sequence
  source: /note="Description of Artificial Sequence: Synthetic oligonucleotide"
gtcggaaactacgtcggaaga

SEQ ID NO: 41423 - DNA, 21 bp, Artificial Sequence
  source: /note="Description of Artificial Sequence: Synthetic oligonucleotide"
gtcggaccaacaggaagcgca

SEQ ID NO: 41424 - DNA, 21 bp, Artificial Sequence
  source: /note="Description of Artificial Sequence: Synthetic oligonucleotide"
gtcggacaaaacgcagaatgg

SEQ ID NO: 41425 - DNA, 21 bp, Artificial Sequence
  source: /note="Description of Artificial Sequence: Synthetic oligonucleotide"
gtcggaagactcacaatgcca

SEQ ID NO: 41426 - DNA, 21 bp, Artificial Sequence
  source: /note="Description of Artificial Sequence: Synthetic oligonucleotide"
gtcggaagaagcgtcctcgac

SEQ ID NO: 41427 - DNA, 21 bp, Artificial Sequence
  source: /note="Description of Artificial Sequence: Synthetic oligonucleotide"
gtcggaagcttcatcccaaca

SEQ ID NO: 41428 - DNA, 21 bp, Artificial Sequence
  source: /note="Description of Artificial Sequence: Synthetic oligonucleotide"
gtcggaagcggagcaccagaa

SEQ ID NO: 41429 - DNA, 21 bp, Artificial Sequence
  source: /note="Description of Artificial Sequence: Synthetic oligonucleotide"
gtcggaagcggactcgacaac

SEQ ID NO: 41430 - DNA, 21 bp, Artificial Sequence
  source: /note="Description of Artificial Sequence: Synthetic oligonucleotide"
gtcggaagcatcgacctccca

SEQ ID NO: 41431 - DNA, 21 bp, Artificial Sequence
  source: /note="Description of Artificial Sequence: Synthetic oligonucleotide"
gtcggaagcaaagcactcctc

SEQ ID NO: 41432 - DNA, 21 bp, Artificial Sequence
  source: /note="Description of Artificial Sequence: Synthetic oligonucleotide"
gtcggaagcctctggctcgac

SEQ ID NO: 41433 - DNA, 21 bp, Artificial Sequence
  source: /note="Description of Artificial Sequence: Synthetic oligonucleotide"
gtcggaagcccaaaaccaaca

SEQ ID NO: 41434 - DNA, 21 bp, Artificial Sequence
  source: /note="Description of Artificial Sequence: Synthetic oligonucleotide"
gtcggaagccaatacctccca

SEQ ID NO: 41435 - DNA, 21 bp, Artificial Sequence
  source: /note="Description of Artificial Sequence: Synthetic oligonucleotide"
gtcggaagcagagcaacaagc

SEQ ID NO: 41436 - DNA, 21 bp, Artificial Sequence
  source: /note="Description of Artificial Sequence: Synthetic oligonucleotide"
gtcggaagcagcaaaggagca

SEQ ID NO: 41437 - DNA, 21 bp, Artificial Sequence
  source: /note="Description of Artificial Sequence: Synthetic oligonucleotide"
gtcggaagcagcgtcgacgca

SEQ ID NO: 41438 - DNA, 21 bp, Artificial Sequence
  source: /note="Description of Artificial Sequence: Synthetic oligonucleotide"
gtcggaagcacaggaagaaca

SEQ ID NO: 41439 - DNA, 21 bp, Artificial Sequence
  source: /note="Description of Artificial Sequence: Synthetic oligonucleotide"
gtcggaagcacaagagaactc

SEQ ID NO: 41440 - DNA, 21 bp, Artificial Sequence
  source: /note="Description of Artificial Sequence: Synthetic oligonucleotide"
gtcggaagctacatcacagtc

SEQ ID NO: 41441 - DNA, 21 bp, Artificial Sequence
  source: /note="Description of Artificial Sequence: Synthetic oligonucleotide"
gtcggaacagtcacaagacca

SEQ ID NO: 41442 - DNA, 21 bp, Artificial Sequence
  source: /note="Description of Artificial Sequence: Synthetic oligonucleotide"
gtcggagtcacaatgccatac

SEQ ID NO: 41443 - DNA, 21 bp, Artificial Sequence
  source: /note="Description of Artificial Sequence: Synthetic oligonucleotide"
gtcggatacgaagcacacgca

SEQ ID NO: 41444 - DNA, 21 bp, Artificial Sequence
  source: /note="Description of Artificial Sequence: Synthetic oligonucleotide"
gtcggatacccagcaaaccca

SEQ ID NO: 41445 - DNA, 21 bp, Artificial Sequence
  source: /note="Description of Artificial Sequence: Synthetic oligonucleotide"
gtccacgcagaactcatgaga

SEQ ID NO: 41446 - DNA, 21 bp, Artificial Sequence
  source: /note="Description of Artificial Sequence: Synthetic oligonucleotide"
gtccacgcaagcacagcagtc

SEQ ID NO: 41447 - DNA, 21 bp, Artificial Sequence
  source: /note="Description of Artificial Sequence: Synthetic oligonucleotide"
gtccacgacggaggaagacac

SEQ ID NO: 41448 - DNA, 21 bp, Artificial Sequence
  source: /note="Description of Artificial Sequence: Synthetic oligonucleotide"
gtccacgacggaaaaatcaga

SEQ ID NO: 41449 - DNA, 21 bp, Artificial Sequence
  source: /note="Description of Artificial Sequence: Synthetic oligonucleotide"
gtccacgaaaacggaagcgtc

SEQ ID NO: 41450 - DNA, 21 bp, Artificial Sequence
  source: /note="Description of Artificial Sequence: Synthetic oligonucleotide"
gtccacggagcagcacaaaca

SEQ ID NO: 41451 - DNA, 21 bp, Artificial Sequence
  source: /note="Description of Artificial Sequence: Synthetic oligonucleotide"
gtccacggaccaatgcaacac

SEQ ID NO: 41452 - DNA, 21 bp, Artificial Sequence
  source: /note="Description of Artificial Sequence: Synthetic oligonucleotide"
gtccacggaacagacccagac

SEQ ID NO: 41453 - DNA, 21 bp, Artificial Sequence
  source: /note="Description of Artificial Sequence: Synthetic oligonucleotide"
gtccaccacaacctcacacca

SEQ ID NO: 41454 - DNA, 21 bp, Artificial Sequence
  source: /note="Description of Artificial Sequence: Synthetic oligonucleotide"
gtccacaaaagcgcagactac

SEQ ID NO: 41455 - DNA, 21 bp, Artificial Sequence
  source: /note="Description of Artificial Sequence: Synthetic oligonucleotide"
gtccacctcccaagcatgcca

SEQ ID NO: 41456 - DNA, 21 bp, Artificial Sequence
  source: /note="Description of Artificial Sequence: Synthetic oligonucleotide"
gtccacctcccaacactcgca

SEQ ID NO: 41457 - DNA, 21 bp, Artificial Sequence
  source: /note="Description of Artificial Sequence: Synthetic oligonucleotide"
gtccacaacggaggaagaagc

SEQ ID NO: 41458 - DNA, 21 bp, Artificial Sequence
  source: /note="Description of Artificial Sequence: Synthetic oligonucleotide"
gtccacaacggactcacacca

SEQ ID NO: 41459 - DNA, 21 bp, Artificial Sequence
  source: /note="Description of Artificial Sequence: Synthetic oligonucleotide"
gtccacaacatgctcaaagca

SEQ ID NO: 41460 - DNA, 21 bp, Artificial Sequence
  source: /note="Description of Artificial Sequence: Synthetic oligonucleotide"
gtccacccacacagcgtcaac

SEQ ID NO: 41461 - DNA, 21 bp, Artificial Sequence
  source: /note="Description of Artificial Sequence: Synthetic oligonucleotide"
gtccacccaagaatgctcaca

SEQ ID NO: 41462 - DNA, 21 bp, Artificial Sequence
  source: /note="Description of Artificial Sequence: Synthetic oligonucleotide"
gtccacccaagcagcgtcaca

SEQ ID NO: 41463 - DNA, 21 bp, Artificial Sequence
  source: /note="Description of Artificial Sequence: Synthetic oligonucleotide"
gtccacccagtcctcgcaagc

SEQ ID NO: 41464 - DNA, 21 bp, Artificial Sequence
  source: /note="Description of Artificial Sequence: Synthetic oligonucleotide"
gtccaccaagcaagattcgca

SEQ ID NO: 41465 - DNA, 21 bp, Artificial Sequence
  source: /note="Description of Artificial Sequence: Synthetic oligonucleotide"
gtccaccaagaaagaagctgg

SEQ ID NO: 41466 - DNA, 21 bp, Artificial Sequence
  source: /note="Description of Artificial Sequence: Synthetic oligonucleotide"
gtccacagacaactcgaagac

SEQ ID NO: 41467 - DNA, 21 bp, Artificial Sequence
  source: /note="Description of Artificial Sequence: Synthetic oligonucleotide"
gtccacagaacacaagacagc

SEQ ID NO: 41468 - DNA, 21 bp, Artificial Sequence
  source: /note="Description of Artificial Sequence: Synthetic oligonucleotide"
gtccacagcttcaaactcgga

SEQ ID NO: 41469 - DNA, 21 bp, Artificial Sequence
  source: /note="Description of Artificial Sequence: Synthetic oligonucleotide"
gtccacagcaacagcccaagc

SEQ ID NO: 41470 - DNA, 21 bp, Artificial Sequence
  source: /note="Description of Artificial Sequence: Synthetic oligonucleotide"
gtccacagcccacaacaaagc

SEQ ID NO: 41471 - DNA, 21 bp, Artificial Sequence
  source: /note="Description of Artificial Sequence: Synthetic oligonucleotide"
gtccacagcagcatcaacgca

SEQ ID NO: 41472 - DNA, 21 bp, Artificial Sequence
  source: /note="Description of Artificial Sequence: Synthetic oligonucleotide"
gtccacacaccaatcggaaca

SEQ ID NO: 41473 - DNA, 21 bp, Artificial Sequence
  source: /note="Description of Artificial Sequence: Synthetic oligonucleotide"
gtccacacaagcacaatcagc

SEQ ID NO: 41474 - DNA, 21 bp, Artificial Sequence
  source: /note="Description of Artificial Sequence: Synthetic oligonucleotide"
gtccacacaacaggaatgctc

SEQ ID NO: 41475 - DNA, 21 bp, Artificial Sequence
  source: /note="Description of Artificial Sequence: Synthetic oligonucleotide"
gtccacgtcagcacaatgcca

SEQ ID NO: 41476 - DNA, 21 bp, Artificial Sequence
  source: /note="Description of Artificial Sequence: Synthetic oligonucleotide"
gtccacgtcacaggaaacctc

SEQ ID NO: 41477 - DNA, 21 bp, Artificial Sequence
  source: /note="Description of Artificial Sequence: Synthetic oligonucleotide"
gtcatcgcaagcgacatcagc

SEQ ID NO: 41478 - DNA, 21 bp, Artificial Sequence
  source: /note="Description of Artificial Sequence: Synthetic oligonucleotide"
gtcatcgcaacagacagactc

SEQ ID NO: 41479 - DNA, 21 bp, Artificial Sequence
  source: /note="Description of Artificial Sequence: Synthetic oligonucleotide"
gtcatcgcagtcgacagaatg

SEQ ID NO: 41480 - DNA, 21 bp, Artificial Sequence
  source: /note="Description of Artificial Sequence: Synthetic oligonucleotide"
gtcatcgacagcgaactcgac

SEQ ID NO: 41481 - DNA, 21 bp, Artificial Sequence
  source: /note="Description of Artificial Sequence: Synthetic oligonucleotide"
gtcatcgacagccaaaaaaaa

SEQ ID NO: 41482 - DNA, 21 bp, Artificial Sequence
  source: /note="Description of Artificial Sequence: Synthetic oligonucleotide"
gtcatcgaagcaagcagaaac

SEQ ID NO: 41483 - DNA, 21 bp, Artificial Sequence
  source: /note="Description of Artificial Sequence: Synthetic oligonucleotide"
gtcatcggaaaaggaacacac

SEQ ID NO: 41484 - DNA, 21 bp, Artificial Sequence
  source: /note="Description of Artificial Sequence: Synthetic oligonucleotide"
gtcatccacacaatgggagca

SEQ ID NO: 41485 - DNA, 21 bp, Artificial Sequence
  source: /note="Description of Artificial Sequence: Synthetic oligonucleotide"
gtcatcatcgaaacaagcgca

SEQ ID NO: 41486 - DNA, 21 bp, Artificial Sequence
  source: /note="Description of Artificial Sequence: Synthetic oligonucleotide"
gtcatcctcgacaaagcagtc

SEQ ID NO: 41487 - DNA, 21 bp, Artificial Sequence
  source: /note="Description of Artificial Sequence: Synthetic oligonucleotide"
gtcatcctcaaaggagcacca

SEQ ID NO: 41488 - DNA, 21 bp, Artificial Sequence
  source: /note="Description of Artificial Sequence: Synthetic oligonucleotide"
gtcatcctcacaagcgcagtc

SEQ ID NO: 41489 - DNA, 21 bp, Artificial Sequence
  source: /note="Description of Artificial Sequence: Synthetic oligonucleotide"
gtcatcaacggactcgcaagc

SEQ ID NO: 41490 - DNA, 21 bp, Artificial Sequence
  source: /note="Description of Artificial Sequence: Synthetic oligonucleotide"
gtcatcaacggactcggagtc

SEQ ID NO: 41491 - DNA, 21 bp, Artificial Sequence
  source: /note="Description of Artificial Sequence: Synthetic oligonucleotide"
gtcatcaacaacacaggaaac

SEQ ID NO: 41492 - DNA, 21 bp, Artificial Sequence
  source: /note="Description of Artificial Sequence: Synthetic oligonucleotide"
gtcatcccaccaatgagaagc

SEQ ID NO: 41493 - DNA, 21 bp, Artificial Sequence
  source: /note="Description of Artificial Sequence: Synthetic oligonucleotide"
gtcatcccaccatgggacatc

SEQ ID NO: 41494 - DNA, 21 bp, Artificial Sequence
  source: /note="Description of Artificial Sequence: Synthetic oligonucleotide"
gtcatcccaagaacactccaa

SEQ ID NO: 41495 - DNA, 21 bp, Artificial Sequence
  source: /note="Description of Artificial Sequence: Synthetic oligonucleotide"
gtcatccaactcagaggagca

SEQ ID NO: 41496 - DNA, 21 bp, Artificial Sequence
  source: /note="Description of Artificial Sequence: Synthetic oligonucleotide"
gtcatcagaccaagcacacac

SEQ ID NO: 41497 - DNA, 21 bp, Artificial Sequence
  source: /note="Description of Artificial Sequence: Synthetic oligonucleotide"
gtcatcagcggactcaacatg

SEQ ID NO: 41498 - DNA, 21 bp, Artificial Sequence
  source: /note="Description of Artificial Sequence: Synthetic oligonucleotide"
gtcatcagccacaaaacaaac

SEQ ID NO: 41499 - DNA, 21 bp, Artificial Sequence
  source: /note="Description of Artificial Sequence: Synthetic oligonucleotide"
gtcatcagcctcagcgaactc

SEQ ID NO: 41500 - DNA, 21 bp, Artificial Sequence
  source: /note="Description of Artificial Sequence: Synthetic oligonucleotide"
gtcatcagcaacacaagagac

SEQ ID NO: 41501 - DNA, 21 bp, Artificial Sequence
  source: /note="Description of Artificial Sequence: Synthetic oligonucleotide"
gtcatcagcagaaaaggacca

SEQ ID NO: 41502 - DNA, 21 bp, Artificial Sequence
  source: /note="Description of Artificial Sequence: Synthetic oligonucleotide"
gtcatcagcagcgcagacctc

SEQ ID NO: 41503 - DNA, 21 bp, Artificial Sequence
  source: /note="Description of Artificial Sequence: Synthetic oligonucleotide"
gtcatcagcagcttcgcagaa

SEQ ID NO: 41504 - DNA, 21 bp, Artificial Sequence
  source: /note="Description of Artificial Sequence: Synthetic oligonucleotide"
gtcatcagcacaagcctccca

SEQ ID NO: 41505 - DNA, 21 bp, Artificial Sequence
  source: /note="Description of Artificial Sequence: Synthetic oligonucleotide"
gtcatcagcgtcccagcaagc

SEQ ID NO: 41506 - DNA, 21 bp, Artificial Sequence
  source: /note="Description of Artificial Sequence: Synthetic oligonucleotide"
gtcatcacagaaaaaagcgca

SEQ ID NO: 41507 - DNA, 21 bp, Artificial Sequence
  source: /note="Description of Artificial Sequence: Synthetic oligonucleotide"
gtcatcacaagaagcggaaca

SEQ ID NO: 41508 - DNA, 21 bp, Artificial Sequence
  source: /note="Description of Artificial Sequence: Synthetic oligonucleotide"
gtcatcacaagcctcggacca

SEQ ID NO: 41509 - DNA, 21 bp, Artificial Sequence
  source: /note="Description of Artificial Sequence: Synthetic oligonucleotide"
gtcatcacaagcacaggagca

SEQ ID NO: 41510 - DNA, 21 bp, Artificial Sequence
  source: /note="Description of Artificial Sequence: Synthetic oligonucleotide"
gtcatcgtcctcggaccagtc

SEQ ID NO: 41511 - DNA, 21 bp, Artificial Sequence
  source: /note="Description of Artificial Sequence: Synthetic oligonucleotide"
gtcatcgtcccagacgtctgg

SEQ ID NO: 41512 - DNA, 21 bp, Artificial Sequence
  source: /note="Description of Artificial Sequence: Synthetic oligonucleotide"
gtcaaagacgcattcgcacca

SEQ ID NO: 41513 - DNA, 21 bp, Artificial Sequence
  source: /note="Description of Artificial Sequence: Synthetic oligonucleotide"
gtcaaagacgaccacagatgc

SEQ ID NO: 41514 - DNA, 21 bp, Artificial Sequence
  source: /note="Description of Artificial Sequence: Synthetic oligonucleotide"
gtcaaagacctcccacaagca

SEQ ID NO: 41515 - DNA, 21 bp, Artificial Sequence
  source: /note="Description of Artificial Sequence: Synthetic oligonucleotide"
gtcaaagacccaagaatgagc

SEQ ID NO: 41516 - DNA, 21 bp, Artificial Sequence
  source: /note="Description of Artificial Sequence: Synthetic oligonucleotide"
gtcaaagacagcacaatcgga

SEQ ID NO: 41517 - DNA, 21 bp, Artificial Sequence
  source: /note="Description of Artificial Sequence: Synthetic oligonucleotide"
gtcaaattccaaccaagcctc

SEQ ID NO: 41518 - DNA, 21 bp, Artificial Sequence
  source: /note="Description of Artificial Sequence: Synthetic oligonucleotide"
gtcaaaggacaactctgctgc

SEQ ID NO: 41519 - DNA, 21 bp, Artificial Sequence
  source: /note="Description of Artificial Sequence: Synthetic oligonucleotide"
gtcaaaggatacagcaactac

SEQ ID NO: 41520 - DNA, 21 bp, Artificial Sequence
  source: /note="Description of Artificial Sequence: Synthetic oligonucleotide"
gtcaaactcgcaatggaagac

SEQ ID NO: 41521 - DNA, 21 bp, Artificial Sequence
  source: /note="Description of Artificial Sequence: Synthetic oligonucleotide"
gtcaaactcggaatccaagca

SEQ ID NO: 41522 - DNA, 21 bp, Artificial Sequence
  source: /note="Description of Artificial Sequence: Synthetic oligonucleotide"
gtcaaaaacgcagtcacacca

SEQ ID NO: 41523 - DNA, 21 bp, Artificial Sequence
  source: /note="Description of Artificial Sequence: Synthetic oligonucleotide"
gtcaaaaactgcatggtcgaa

SEQ ID NO: 41524 - DNA, 21 bp, Artificial Sequence
  source: /note="Description of Artificial Sequence: Synthetic oligonucleotide"
gtcaaaaacccaatcagctac

SEQ ID NO: 41525 - DNA, 21 bp, Artificial Sequence
  source: /note="Description of Artificial Sequence: Synthetic oligonucleotide"
gtcaaaaacacaaacgtcagc

SEQ ID NO: 41526 - DNA, 21 bp, Artificial Sequence
  source: /note="Description of Artificial Sequence: Synthetic oligonucleotide"
gtcaaaaacacatacccagaa

SEQ ID NO: 41527 - DNA, 21 bp, Artificial Sequence
  source: /note="Description of Artificial Sequence: Synthetic oligonucleotide"
gtcaaaaactacgaaccacaa

SEQ ID NO: 41528 - DNA, 21 bp, Artificial Sequence
  source: /note="Description of Artificial Sequence: Synthetic oligonucleotide"
gtcaaaccagacgcatgcttc

SEQ ID NO: 41529 - DNA, 21 bp, Artificial Sequence
  source: /note="Description of Artificial Sequence: Synthetic oligonucleotide"
gtcaaaccaggaatgatgcca

SEQ ID NO: 41530 - DNA, 21 bp, Artificial Sequence
  source: /note="Description of Artificial Sequence: Synthetic oligonucleotide"
gtcaaaccactcggaatgcca

SEQ ID NO: 41531 - DNA, 21 bp, Artificial Sequence
  source: /note="Description of Artificial Sequence: Synthetic oligonucleotide"
gtcaaaccaatggcaagcagc

SEQ ID NO: 41532 - DNA, 21 bp, Artificial Sequence
  source: /note="Description of Artificial Sequence: Synthetic oligonucleotide"
gtcaaaccaagcccaatcctc

SEQ ID NO: 41533 - DNA, 21 bp, Artificial Sequence
  source: /note="Description of Artificial Sequence: Synthetic oligonucleotide"
gtcaaaccaacaccagacgca

SEQ ID NO: 41534 - DNA, 21 bp, Artificial Sequence
  source: /note="Description of Artificial Sequence: Synthetic oligonucleotide"
gtcaaaccatacagcctccac

SEQ ID NO: 41535 - DNA, 21 bp, Artificial Sequence
  source: /note="Description of Artificial Sequence: Synthetic oligonucleotide"
gtcaaaccatacgtcacaatg

SEQ ID NO: 41536 - DNA, 21 bp, Artificial Sequence
  source: /note="Description of Artificial Sequence: Synthetic oligonucleotide"
gtcaaacaaagagcaatggtc

SEQ ID NO: 41537 - DNA, 21 bp, Artificial Sequence
  source: /note="Description of Artificial Sequence: Synthetic oligonucleotide"
gtcaaaagcgcagaaacaatc

SEQ ID NO: 41538 - DNA, 21 bp, Artificial Sequence
  source: /note="Description of Artificial Sequence: Synthetic oligonucleotide"
gtcaaaagcgacatcctcgca

SEQ ID NO: 41539 - DNA, 21 bp, Artificial Sequence
  source: /note="Description of Artificial Sequence: Synthetic oligonucleotide"
gtcaaaagcgaattcccaaaa

SEQ ID NO: 41540 - DNA, 21 bp, Artificial Sequence
  source: /note="Description of Artificial Sequence: Synthetic oligonucleotide"
gtcaaaagcgaaacaggagtc

SEQ ID NO: 41541 - DNA, 21 bp, Artificial Sequence
  source: /note="Description of Artificial Sequence: Synthetic oligonucleotide"
gtcaaaagcagagcagaaaca

SEQ ID NO: 41542 - DNA, 21 bp, Artificial Sequence
  source: /note="Description of Artificial Sequence: Synthetic oligonucleotide"
gtcaaaagcagcgacagcaca

SEQ ID NO: 41543 - DNA, 21 bp, Artificial Sequence
  source: /note="Description of Artificial Sequence: Synthetic oligonucleotide"
gtcaaaacaaacgcaacactc

SEQ ID NO: 41544 - DNA, 21 bp, Artificial Sequence
  source: /note="Description of Artificial Sequence: Synthetic oligonucleotide"
gtcaaaacaccaccactcaca

SEQ ID NO: 41545 - DNA, 21 bp, Artificial Sequence
  source: /note="Description of Artificial Sequence: Synthetic oligonucleotide"
gtcaaaacaccaagcctcaac

SEQ ID NO: 41546 - DNA, 21 bp, Artificial Sequence
  source: /note="Description of Artificial Sequence: Synthetic oligonucleotide"
gtcaaaacaccatggggacca

SEQ ID NO: 41547 - DNA, 21 bp, Artificial Sequence
  source: /note="Description of Artificial Sequence: Synthetic oligonucleotide"
gtcaaaacacaaagcgacctc

SEQ ID NO: 41548 - DNA, 21 bp, Artificial Sequence
  source: /note="Description of Artificial Sequence: Synthetic oligonucleotide"
gtcaaagtcccaggagcattc

SEQ ID NO: 41549 - DNA, 21 bp, Artificial Sequence
  source: /note="Description of Artificial Sequence: Synthetic oligonucleotide"
gtcctcgcacacagcgacagc

SEQ ID NO: 41550 - DNA, 21 bp, Artificial Sequence
  source: /note="Description of Artificial Sequence: Synthetic oligonucleotide"
gtcctcgcacacagcacatac

SEQ ID NO: 41551 - DNA, 21 bp, Artificial Sequence
  source: /note="Description of Artificial Sequence: Synthetic oligonucleotide"
gtcctcgcaccactcgtcagc

SEQ ID NO: 41552 - DNA, 21 bp, Artificial Sequence
  source: /note="Description of Artificial Sequence: Synthetic oligonucleotide"
gtcctcgcaagacaataccca

SEQ ID NO: 41553 - DNA, 21 bp, Artificial Sequence
  source: /note="Description of Artificial Sequence: Synthetic oligonucleotide"
gtcctcgcaagcacagtcagc

SEQ ID NO: 41554 - DNA, 21 bp, Artificial Sequence
  source: /note="Description of Artificial Sequence: Synthetic oligonucleotide"
gtcctcgcaacaacagtcgga

SEQ ID NO: 41555 - DNA, 21 bp, Artificial Sequence
  source: /note="Description of Artificial Sequence: Synthetic oligonucleotide"
gtcctcgcaacagtcacaaaa

SEQ ID NO: 41556 - DNA, 21 bp, Artificial Sequence
  source: /note="Description of Artificial Sequence: Synthetic oligonucleotide"
gtcctcgcagtcagaacaaac

SEQ ID NO: 41557 - DNA, 21 bp, Artificial Sequence
  source: /note="Description of Artificial Sequence: Synthetic oligonucleotide"
gtcctcgactgggaaggagac

SEQ ID NO: 41558 - DNA, 21 bp, Artificial Sequence
  source: /note="Description of Artificial Sequence: Synthetic oligonucleotide"
gtcctcgaacacctccaccca

SEQ ID NO: 41559 - DNA, 21 bp, Artificial Sequence
  source: /note="Description of Artificial Sequence: Synthetic oligonucleotide"
gtcctcgaaaaactcaaaaca

SEQ ID NO: 41560 - DNA, 21 bp, Artificial Sequence
  source: /note="Description of Artificial Sequence: Synthetic oligonucleotide"
gtcctcgaactcgaacacaga

SEQ ID NO: 41561 - DNA, 21 bp, Artificial Sequence
  source: /note="Description of Artificial Sequence: Synthetic oligonucleotide"
gtcctcgaaccactcagcaaa

SEQ ID NO: 41562 - DNA, 21 bp, Artificial Sequence
  source: /note="Description of Artificial Sequence: Synthetic oligonucleotide"
gtcctcgaaacaagaacactc

SEQ ID NO: 41563 - DNA, 21 bp, Artificial Sequence
  source: /note="Description of Artificial Sequence: Synthetic oligonucleotide"
gtcctcggaggactcgcaagc

SEQ ID NO: 41564 - DNA, 21 bp, Artificial Sequence
  source: /note="Description of Artificial Sequence: Synthetic oligonucleotide"
gtcctcggactcgcaccagca

SEQ ID NO: 41565 - DNA, 21 bp, Artificial Sequence
  source: /note="Description of Artificial Sequence: Synthetic oligonucleotide"
gtcctcggactcggaggacca

SEQ ID NO: 41566 - DNA, 21 bp, Artificial Sequence
  source: /note="Description of Artificial Sequence: Synthetic oligonucleotide"
gtcctcggaatgggagaatgg

SEQ ID NO: 41567 - DNA, 21 bp, Artificial Sequence
  source: /note="Description of Artificial Sequence: Synthetic oligonucleotide"
gtcctcggaagaggatacagc

SEQ ID NO: 41568 - DNA, 21 bp, Artificial Sequence
  source: /note="Description of Artificial Sequence: Synthetic oligonucleotide"
gtcctcggaagcctccaacac

SEQ ID NO: 41569 - DNA, 21 bp, Artificial Sequence
  source: /note="Description of Artificial Sequence: Synthetic oligonucleotide"
gtcctcggaagcgtcggaagc

SEQ ID NO: 41570 - DNA, 21 bp, Artificial Sequence
  source: /note="Description of Artificial Sequence: Synthetic oligonucleotide"
gtcctcggatacagcaaacca

SEQ ID NO: 41571 - DNA, 21 bp, Artificial Sequence
  source: /note="Description of Artificial Sequence: Synthetic oligonucleotide"
gtcctccacgcagcaagcgca

SEQ ID NO: 41572 - DNA, 21 bp, Artificial Sequence
  source: /note="Description of Artificial Sequence: Synthetic oligonucleotide"
gtcctccaccaaagaggagca

SEQ ID NO: 41573 - DNA, 21 bp, Artificial Sequence
  source: /note="Description of Artificial Sequence: Synthetic oligonucleotide"
gtcctcaaagcacacccagac

SEQ ID NO: 41574 - DNA, 21 bp, Artificial Sequence
  source: /note="Description of Artificial Sequence: Synthetic oligonucleotide"
gtcctcaaaccaggagtcaca

SEQ ID NO: 41575 - DNA, 21 bp, Artificial Sequence
  source: /note="Description of Artificial Sequence: Synthetic oligonucleotide"
gtcctcaaaccaagcgtccca

SEQ ID NO: 41576 - DNA, 21 bp, Artificial Sequence
  source: /note="Description of Artificial Sequence: Synthetic oligonucleotide"
gtcctcaaaccatacatcaac

SEQ ID NO: 41577 - DNA, 21 bp, Artificial Sequence
  source: /note="Description of Artificial Sequence: Synthetic oligonucleotide"
gtcctcaaaagccacagcgca

SEQ ID NO: 41578 - DNA, 21 bp, Artificial Sequence
  source: /note="Description of Artificial Sequence: Synthetic oligonucleotide"
gtcctcaaaagcagcgcaagc

SEQ ID NO: 41579 - DNA, 21 bp, Artificial Sequence
  source: /note="Description of Artificial Sequence: Synthetic oligonucleotide"
gtcctcctcccaagccaccca

SEQ ID NO: 41580 - DNA, 21 bp, Artificial Sequence
  source: /note="Description of Artificial Sequence: Synthetic oligonucleotide"
gtcctcctcacaaaaacatgc

SEQ ID NO: 41581 - DNA, 21 bp, Artificial Sequence
  source: /note="Description of Artificial Sequence: Synthetic oligonucleotide"
gtcctcatgccaagcacaatc

SEQ ID NO: 41582 - DNA, 21 bp, Artificial Sequence
  source: /note="Description of Artificial Sequence: Synthetic oligonucleotide"
gtcctcatgccaacagaagca

SEQ ID NO: 41583 - DNA, 21 bp, Artificial Sequence
  source: /note="Description of Artificial Sequence: Synthetic oligonucleotide"
gtcctcaacggaagaagcagc

SEQ ID NO: 41584 - DNA, 21 bp, Artificial Sequence
  source: /note="Description of Artificial Sequence: Synthetic oligonucleotide"
gtcctcaaccacccaacattc

SEQ ID NO: 41585 - DNA, 21 bp, Artificial Sequence
  source: /note="Description of Artificial Sequence: Synthetic oligonucleotide"
gtcctcaaccaccaaagcagc

SEQ ID NO: 41586 - DNA, 21 bp, Artificial Sequence
  source: /note="Description of Artificial Sequence: Synthetic oligonucleotide"
gtcctcaacctcacacaagga

SEQ ID NO: 41587 - DNA, 21 bp, Artificial Sequence
  source: /note="Description of Artificial Sequence: Synthetic oligonucleotide"
gtcctcaacccactcaacagc

SEQ ID NO: 41588 - DNA, 21 bp, Artificial Sequence
  source: /note="Description of Artificial Sequence: Synthetic oligonucleotide"
gtcctcaacacagacgtcaca

SEQ ID NO: 41589 - DNA, 21 bp, Artificial Sequence
  source: /note="Description of Artificial Sequence: Synthetic oligonucleotide"
gtcctcaacacaggagtcgga

SEQ ID NO: 41590 - DNA, 21 bp, Artificial Sequence
  source: /note="Description of Artificial Sequence: Synthetic oligonucleotide"
gtcctcccaaaaacaagcgca

SEQ ID NO: 41591 - DNA, 21 bp, Artificial Sequence
  source: /note="Description of Artificial Sequence: Synthetic oligonucleotide"
gtcctcccaaacagcaaaaac

SEQ ID NO: 41592 - DNA, 21 bp, Artificial Sequence
  source: /note="Description of Artificial Sequence: Synthetic oligonucleotide"
gtcctcccaccactcgcagca

SEQ ID NO: 41593 - DNA, 21 bp, Artificial Sequence
  source: /note="Description of Artificial Sequence: Synthetic oligonucleotide"
gtcctcccaccaaacaacaaa

SEQ ID NO: 41594 - DNA, 21 bp, Artificial Sequence
  source: /note="Description of Artificial Sequence: Synthetic oligonucleotide"
gtcctcccagtcccaagagca

SEQ ID NO: 41595 - DNA, 21 bp, Artificial Sequence
  source: /note="Description of Artificial Sequence: Synthetic oligonucleotide"
gtcctccaaggaagcagcgca

SEQ ID NO: 41596 - DNA, 21 bp, Artificial Sequence
  source: /note="Description of Artificial Sequence: Synthetic oligonucleotide"
gtcctccaaacaacaagacca

SEQ ID NO: 41597 - DNA, 21 bp, Artificial Sequence
  source: /note="Description of Artificial Sequence: Synthetic oligonucleotide"
gtcctcagaggacacctcgca

SEQ ID NO: 41598 - DNA, 21 bp, Artificial Sequence
  source: /note="Description of Artificial Sequence: Synthetic oligonucleotide"
gtcctcagactcggaacagca

SEQ ID NO: 41599 - DNA, 21 bp, Artificial Sequence
  source: /note="Description of Artificial Sequence: Synthetic oligonucleotide"
gtcctcagaaacggagcagaa

SEQ ID NO: 41600 - DNA, 21 bp, Artificial Sequence
  source: /note="Description of Artificial Sequence: Synthetic oligonucleotide"
gtcctcagacaaagcgtccca

SEQ ID NO: 41601 - DNA, 21 bp, Artificial Sequence
  source: /note="Description of Artificial Sequence: Synthetic oligonucleotide"
gtcctcagaagcgacgcagca

SEQ ID NO: 41602 - DNA, 21 bp, Artificial Sequence
  source: /note="Description of Artificial Sequence: Synthetic oligonucleotide"
gtcctcagaacaggagaattc

SEQ ID NO: 41603 - DNA, 21 bp, Artificial Sequence
  source: /note="Description of Artificial Sequence: Synthetic oligonucleotide"
gtcctcagaacaagcagcgga

SEQ ID NO: 41604 - DNA, 21 bp, Artificial Sequence
  source: /note="Description of Artificial Sequence: Synthetic oligonucleotide"
gtcctcagccacgacgtcgtc

SEQ ID NO: 41605 - DNA, 21 bp, Artificial Sequence
  source: /note="Description of Artificial Sequence: Synthetic oligonucleotide"
gtcctcagccacggaggagca

SEQ ID NO: 41606 - DNA, 21 bp, Artificial Sequence
  source: /note="Description of Artificial Sequence: Synthetic oligonucleotide"
gtcctcagcccaaacacagca

SEQ ID NO: 41607 - DNA, 21 bp, Artificial Sequence
  source: /note="Description of Artificial Sequence: Synthetic oligonucleotide"
gtcctcagcccaacaggaatg

SEQ ID NO: 41608 - DNA, 21 bp, Artificial Sequence
  source: /note="Description of Artificial Sequence: Synthetic oligonucleotide"
gtcctcagcagaggaaacaca

SEQ ID NO: 41609 - DNA, 21 bp, Artificial Sequence
  source: /note="Description of Artificial Sequence: Synthetic oligonucleotide"
gtcctcagcagcaacagctac

SEQ ID NO: 41610 - DNA, 21 bp, Artificial Sequence
  source: /note="Description of Artificial Sequence: Synthetic oligonucleotide"
gtcctcagcacaatcagcagc

SEQ ID NO: 41611 - DNA, 21 bp, Artificial Sequence
  source: /note="Description of Artificial Sequence: Synthetic oligonucleotide"
gtcctcagcacaatgagccca

SEQ ID NO: 41612 - DNA, 21 bp, Artificial Sequence
  source: /note="Description of Artificial Sequence: Synthetic oligonucleotide"
gtcctcagcgtcagcggaaga

SEQ ID NO: 41613 - DNA, 21 bp, Artificial Sequence
  source: /note="Description of Artificial Sequence: Synthetic oligonucleotide"
gtcctcagctaccacacagga

SEQ ID NO: 41614 - DNA, 21 bp, Artificial Sequence
  source: /note="Description of Artificial Sequence: Synthetic oligonucleotide"
gtcctcacagcaacaatgagc

SEQ ID NO: 41615 - DNA, 21 bp, Artificial Sequence
  source: /note="Description of Artificial Sequence: Synthetic oligonucleotide"
gtcctcacaggacaaagactc

SEQ ID NO: 41616 - DNA, 21 bp, Artificial Sequence
  source: /note="Description of Artificial Sequence: Synthetic oligonucleotide"
gtcctcacacaacaaccagtc

SEQ ID NO: 41617 - DNA, 21 bp, Artificial Sequence
  source: /note="Description of Artificial Sequence: Synthetic oligonucleotide"
gtcctcacaagagcaggaatc

SEQ ID NO: 41618 - DNA, 21 bp, Artificial Sequence
  source: /note="Description of Artificial Sequence: Synthetic oligonucleotide"
gtcctcacaagcaacacacca

SEQ ID NO: 41619 - DNA, 21 bp, Artificial Sequence
  source: /note="Description of Artificial Sequence: Synthetic oligonucleotide"
gtcctcgtcgcagcaagcatg

SEQ ID NO: 41620 - DNA, 21 bp, Artificial Sequence
  source: /note="Description of Artificial Sequence: Synthetic oligonucleotide"
gtcctcgtcagaagcggaagc

SEQ ID NO: 41621 - DNA, 21 bp, Artificial Sequence
  source: /note="Description of Artificial Sequence: Synthetic oligonucleotide"
gtcctcgtcgtcccaaaccac

SEQ ID NO: 41622 - DNA, 21 bp, Artificial Sequence
  source: /note="Description of Artificial Sequence: Synthetic oligonucleotide"
gtcctcgtcgtcagaggaaca

SEQ ID NO: 41623 - DNA, 21 bp, Artificial Sequence
  source: /note="Description of Artificial Sequence: Synthetic oligonucleotide"
gtcctctacagcggactcagc

SEQ ID NO: 41624 - DNA, 21 bp, Artificial Sequence
  source: /note="Description of Artificial Sequence: Synthetic oligonucleotide"
gtcctctacacaaacctcgaa

SEQ ID NO: 41625 - DNA, 21 bp, Artificial Sequence
  source: /note="Description of Artificial Sequence: Synthetic oligonucleotide"
gtcatggacggactcgaacca

SEQ ID NO: 41626 - DNA, 21 bp, Artificial Sequence
  source: /note="Description of Artificial Sequence: Synthetic oligonucleotide"
gtcatggacggagtcagacca

SEQ ID NO: 41627 - DNA, 21 bp, Artificial Sequence
  source: /note="Description of Artificial Sequence: Synthetic oligonucleotide"
gtcatgggagcaaaaggactc

SEQ ID NO: 41628 - DNA, 21 bp, Artificial Sequence
  source: /note="Description of Artificial Sequence: Synthetic oligonucleotide"
gtcatgggaggaaacccaagc

SEQ ID NO: 41629 - DNA, 21 bp, Artificial Sequence
  source: /note="Description of Artificial Sequence: Synthetic oligonucleotide"
gtcatgcacctcgcagacgac

SEQ ID NO: 41630 - DNA, 21 bp, Artificial Sequence
  source: /note="Description of Artificial Sequence: Synthetic oligonucleotide"
gtcatgaacctcctcaaacac

SEQ ID NO: 41631 - DNA, 21 bp, Artificial Sequence
  source: /note="Description of Artificial Sequence: Synthetic oligonucleotide"
gtcatgaacctcagcacaatg

SEQ ID NO: 41632 - DNA, 21 bp, Artificial Sequence
  source: /note="Description of Artificial Sequence: Synthetic oligonucleotide"
gtcatgaacagcccaagaagc

SEQ ID NO: 41633 - DNA, 21 bp, Artificial Sequence
  source: /note="Description of Artificial Sequence: Synthetic oligonucleotide"
gtcatgccattcacacacgac

SEQ ID NO: 41634 - DNA, 21 bp, Artificial Sequence
  source: /note="Description of Artificial Sequence: Synthetic oligonucleotide"
gtcatgccaaacacaccaagc

SEQ ID NO: 41635 - DNA, 21 bp, Artificial Sequence
  source: /note="Description of Artificial Sequence: Synthetic oligonucleotide"
gtcatgccacaaagactcagc

SEQ ID NO: 41636 - DNA, 21 bp, Artificial Sequence
  source: /note="Description of Artificial Sequence: Synthetic oligonucleotide"
gtcatgccaagcgcaagcgca

SEQ ID NO: 41637 - DNA, 21 bp, Artificial Sequence
  source: /note="Description of Artificial Sequence: Synthetic oligonucleotide"
gtcatgccaagcctcgtcagc

SEQ ID NO: 41638 - DNA, 21 bp, Artificial Sequence
  source: /note="Description of Artificial Sequence: Synthetic oligonucleotide"
gtcatgcaagcaagcaacagc

SEQ ID NO: 41639 - DNA, 21 bp, Artificial Sequence
  source: /note="Description of Artificial Sequence: Synthetic oligonucleotide"
gtcatgcaagaaaactgccca

SEQ ID NO: 41640 - DNA, 21 bp, Artificial Sequence
  source: /note="Description of Artificial Sequence: Synthetic oligonucleotide"
gtcatgcaactcggagaaagc

SEQ ID NO: 41641 - DNA, 21 bp, Artificial Sequence
  source: /note="Description of Artificial Sequence: Synthetic oligonucleotide"
gtcatgcaaagcatcctcgca

SEQ ID NO: 41642 - DNA, 21 bp, Artificial Sequence
  source: /note="Description of Artificial Sequence: Synthetic oligonucleotide"
gtcatgagactcgacaaacaa

SEQ ID NO: 41643 - DNA, 21 bp, Artificial Sequence
  source: /note="Description of Artificial Sequence: Synthetic oligonucleotide"
gtcatgagaccagacagaagc

SEQ ID NO: 41644 - DNA, 21 bp, Artificial Sequence
  source: /note="Description of Artificial Sequence: Synthetic oligonucleotide"
gtcatgagcgcagtcgacctc

SEQ ID NO: 41645 - DNA, 21 bp, Artificial Sequence
  source: /note="Description of Artificial Sequence: Synthetic oligonucleotide"
gtcatgagcgacagcaaagtc

SEQ ID NO: 41646 - DNA, 21 bp, Artificial Sequence
  source: /note="Description of Artificial Sequence: Synthetic oligonucleotide"
gtcatgagcatgccaagactc

SEQ ID NO: 41647 - DNA, 21 bp, Artificial Sequence
  source: /note="Description of Artificial Sequence: Synthetic oligonucleotide"
gtcatgagcccagacagcatg

SEQ ID NO: 41648 - DNA, 21 bp, Artificial Sequence
  source: /note="Description of Artificial Sequence: Synthetic oligonucleotide"
gtcatgagcagcagaacaaca

SEQ ID NO: 41649 - DNA, 21 bp, Artificial Sequence
  source: /note="Description of Artificial Sequence: Synthetic oligonucleotide"
gtcatgacagacgcactccac

SEQ ID NO: 41650 - DNA, 21 bp, Artificial Sequence
  source: /note="Description of Artificial Sequence: Synthetic oligonucleotide"
gtcatgacaagccacccaatg

SEQ ID NO: 41651 - DNA, 21 bp, Artificial Sequence
  source: /note="Description of Artificial Sequence: Synthetic oligonucleotide"
gtcatgacaagccaagcaatg

SEQ ID NO: 41652 - DNA, 21 bp, Artificial Sequence
  source: /note="Description of Artificial Sequence: Synthetic oligonucleotide"
gtcatgacaacaacaggacac

SEQ ID NO: 41653 - DNA, 21 bp, Artificial Sequence
  source: /note="Description of Artificial Sequence: Synthetic oligonucleotide"
gtcatgacagtcgcaagcctc

SEQ ID NO: 41654 - DNA, 21 bp, Artificial Sequence
  source: /note="Description of Artificial Sequence: Synthetic oligonucleotide"
gtcatggtcgaaagcggacca

SEQ ID NO: 41655 - DNA, 21 bp, Artificial Sequence
  source: /note="Description of Artificial Sequence: Synthetic oligonucleotide"
gtcaacgcaaaaagcagcaca

SEQ ID NO: 41656 - DNA, 21 bp, Artificial Sequence
  source: /note="Description of Artificial Sequence: Synthetic oligonucleotide"
gtcaacgcactcagcagcgca

SEQ ID NO: 41657 - DNA, 21 bp, Artificial Sequence
  source: /note="Description of Artificial Sequence: Synthetic oligonucleotide"
gtcaacgcagtcggagcacca

SEQ ID NO: 41658 - DNA, 21 bp, Artificial Sequence
  source: /note="Description of Artificial Sequence: Synthetic oligonucleotide"
gtcaacgacgtcctcccaaca

SEQ ID NO: 41659 - DNA, 21 bp, Artificial Sequence
  source: /note="Description of Artificial Sequence: Synthetic oligonucleotide"
gtcaacgactacgcacacagc

SEQ ID NO: 41660 - DNA, 21 bp, Artificial Sequence
  source: /note="Description of Artificial Sequence: Synthetic oligonucleotide"
gtcaacgaactcggaagaaca

SEQ ID NO: 41661 - DNA, 21 bp, Artificial Sequence
  source: /note="Description of Artificial Sequence: Synthetic oligonucleotide"
gtcaacgaactcgtcagaaca

SEQ ID NO: 41662 - DNA, 21 bp, Artificial Sequence
  source: /note="Description of Artificial Sequence: Synthetic oligonucleotide"
gtcaacttcaacccaatcagc

SEQ ID NO: 41663 - DNA, 21 bp, Artificial Sequence
  source: /note="Description of Artificial Sequence: Synthetic oligonucleotide"
gtcaacggacacgcactcaca

SEQ ID NO: 41664 - DNA, 21 bp, Artificial Sequence
  source: /note="Description of Artificial Sequence: Synthetic oligonucleotide"
gtcaacggactcaacgtcgtc

SEQ ID NO: 41665 - DNA, 21 bp, Artificial Sequence
  source: /note="Description of Artificial Sequence: Synthetic oligonucleotide"
gtcaacggaaacgaacacgga

SEQ ID NO: 41666 - DNA, 21 bp, Artificial Sequence
  source: /note="Description of Artificial Sequence: Synthetic oligonucleotide"
gtcaacggaagcgcattcagc

SEQ ID NO: 41667 - DNA, 21 bp, Artificial Sequence
  source: /note="Description of Artificial Sequence: Synthetic oligonucleotide"
gtcaaccacatgagcagccca

SEQ ID NO: 41668 - DNA, 21 bp, Artificial Sequence
  source: /note="Description of Artificial Sequence: Synthetic oligonucleotide"
gtcaaccacagaagcgcacca

SEQ ID NO: 41669 - DNA, 21 bp, Artificial Sequence
  source: /note="Description of Artificial Sequence: Synthetic oligonucleotide"
gtcaacaaagacccactcgca

SEQ ID NO: 41670 - DNA, 21 bp, Artificial Sequence
  source: /note="Description of Artificial Sequence: Synthetic oligonucleotide"
gtcaacaaaggagtcagcgca

SEQ ID NO: 41671 - DNA, 21 bp, Artificial Sequence
  source: /note="Description of Artificial Sequence: Synthetic oligonucleotide"
gtcaacaaaagcggataccca

SEQ ID NO: 41672 - DNA, 21 bp, Artificial Sequence
  source: /note="Description of Artificial Sequence: Synthetic oligonucleotide"
gtcaacaaaagcacagtcagc

SEQ ID NO: 41673 - DNA, 21 bp, Artificial Sequence
  source: /note="Description of Artificial Sequence: Synthetic oligonucleotide"
gtcaacaaaagctacagcatg

SEQ ID NO: 41674 - DNA, 21 bp, Artificial Sequence
  source: /note="Description of Artificial Sequence: Synthetic oligonucleotide"
gtcaacctcgcaagcagcgtc

SEQ ID NO: 41675 - DNA, 21 bp, Artificial Sequence
  source: /note="Description of Artificial Sequence: Synthetic oligonucleotide"
gtcaacctcggaagcaacaac

SEQ ID NO: 41676 - DNA, 21 bp, Artificial Sequence
  source: /note="Description of Artificial Sequence: Synthetic oligonucleotide"
gtcaacctcagactcggaagc

SEQ ID NO: 41677 - DNA, 21 bp, Artificial Sequence
  source: /note="Description of Artificial Sequence: Synthetic oligonucleotide"
gtcaacctcagcagcgtctgc

SEQ ID NO: 41678 - DNA, 21 bp, Artificial Sequence
  source: /note="Description of Artificial Sequence: Synthetic oligonucleotide"
gtcaacctcgtccacggagtc

SEQ ID NO: 41679 - DNA, 21 bp, Artificial Sequence
  source: /note="Description of Artificial Sequence: Synthetic oligonucleotide"
gtcaacctctacctcacagaa

SEQ ID NO: 41680 - DNA, 21 bp, Artificial Sequence
  source: /note="Description of Artificial Sequence: Synthetic oligonucleotide"
gtcaacaacacaagaaacgtc

SEQ ID NO: 41681 - DNA, 21 bp, Artificial Sequence
  source: /note="Description of Artificial Sequence: Synthetic oligonucleotide"
gtcaacccaccaaacgtcgga

SEQ ID NO: 41682 - DNA, 21 bp, Artificial Sequence
  source: /note="Description of Artificial Sequence: Synthetic oligonucleotide"
gtcaacccaccaagcagacca

SEQ ID NO: 41683 - DNA, 21 bp, Artificial Sequence
  source: /note="Description of Artificial Sequence: Synthetic oligonucleotide"
gtcaacccaccaacacacgtc

SEQ ID NO: 41684 - DNA, 21 bp, Artificial Sequence
  source: /note="Description of Artificial Sequence: Synthetic oligonucleotide"
gtcaacccaagagtcgtccaa

SEQ ID NO: 41685 - DNA, 21 bp, Artificial Sequence
  source: /note="Description of Artificial Sequence: Synthetic oligonucleotide"
gtcaacccaagcgcaagcagc

SEQ ID NO: 41686 - DNA, 21 bp, Artificial Sequence
  source: /note="Description of Artificial Sequence: Synthetic oligonucleotide"
gtcaacccaagcagcccaagc

SEQ ID NO: 41687 - DNA, 21 bp, Artificial Sequence
  source: /note="Description of Artificial Sequence: Synthetic oligonucleotide"
gtcaacagaagcgtcagccca

SEQ ID NO: 41688 - DNA, 21 bp, Artificial Sequence
  source: /note="Description of Artificial Sequence: Synthetic oligonucleotide"
gtcaacagaacaacactctac

SEQ ID NO: 41689 - DNA, 21 bp, Artificial Sequence
  source: /note="Description of Artificial Sequence: Synthetic oligonucleotide"
gtcaacagcgcaagcaaaagc

SEQ ID NO: 41690 - DNA, 21 bp, Artificial Sequence
  source: /note="Description of Artificial Sequence: Synthetic oligonucleotide"
gtcaacagcttcgaaagaagc

SEQ ID NO: 41691 - DNA, 21 bp, Artificial Sequence
  source: /note="Description of Artificial Sequence: Synthetic oligonucleotide"
gtcaacagcggagcaacaaca

SEQ ID NO: 41692 - DNA, 21 bp, Artificial Sequence
  source: /note="Description of Artificial Sequence: Synthetic oligonucleotide"
gtcaacagcatggaaagacca

SEQ ID NO: 41693 - DNA, 21 bp, Artificial Sequence
  source: /note="Description of Artificial Sequence: Synthetic oligonucleotide"
gtcaacagcagactcatcgca

SEQ ID NO: 41694 - DNA, 21 bp, Artificial Sequence
  source: /note="Description of Artificial Sequence: Synthetic oligonucleotide"
gtcaacagcagcctccacgga

SEQ ID NO: 41695 - DNA, 21 bp, Artificial Sequence
  source: /note="Description of Artificial Sequence: Synthetic oligonucleotide"
gtcaacagcagcaacagcaga

SEQ ID NO: 41696 - DNA, 21 bp, Artificial Sequence
  source: /note="Description of Artificial Sequence: Synthetic oligonucleotide"
gtcaacagcagcgtctgggca

SEQ ID NO: 41697 - DNA, 21 bp, Artificial Sequence
  source: /note="Description of Artificial Sequence: Synthetic oligonucleotide"
gtcaacagcacagcattccac

SEQ ID NO: 41698 - DNA, 21 bp, Artificial Sequence
  source: /note="Description of Artificial Sequence: Synthetic oligonucleotide"
gtcaacacaaaagtcggacca

SEQ ID NO: 41699 - DNA, 21 bp, Artificial Sequence
  source: /note="Description of Artificial Sequence: Synthetic oligonucleotide"
gtcaacacactcacaggagac

SEQ ID NO: 41700 - DNA, 21 bp, Artificial Sequence
  source: /note="Description of Artificial Sequence: Synthetic oligonucleotide"
gtcaacacaaacctcgcaagc

SEQ ID NO: 41701 - DNA, 21 bp, Artificial Sequence
  source: /note="Description of Artificial Sequence: Synthetic oligonucleotide"
gtcaacacaagcggatggcaa

SEQ ID NO: 41702 - DNA, 21 bp, Artificial Sequence
  source: /note="Description of Artificial Sequence: Synthetic oligonucleotide"
gtcaacacagtcccatacgga

SEQ ID NO: 41703 - DNA, 21 bp, Artificial Sequence
  source: /note="Description of Artificial Sequence: Synthetic oligonucleotide"
gtcaacacagtcacaagcagc

SEQ ID NO: 41704 - DNA, 21 bp, Artificial Sequence
  source: /note="Description of Artificial Sequence: Synthetic oligonucleotide"
gtcaacgtcggaacactctac

SEQ ID NO: 41705 - DNA, 21 bp, Artificial Sequence
  source: /note="Description of Artificial Sequence: Synthetic oligonucleotide"
gtcaacgtcaaaagagaagtc

SEQ ID NO: 41706 - DNA, 21 bp, Artificial Sequence
  source: /note="Description of Artificial Sequence: Synthetic oligonucleotide"
gtcaacgtcagagaaacaaca

SEQ ID NO: 41707 - DNA, 21 bp, Artificial Sequence
  source: /note="Description of Artificial Sequence: Synthetic oligonucleotide"
gtcaacgtcagccactacagc

SEQ ID NO: 41708 - DNA, 21 bp, Artificial Sequence
  source: /note="Description of Artificial Sequence: Synthetic oligonucleotide"
gtcaacgtcagccaaacagga

SEQ ID NO: 41709 - DNA, 21 bp, Artificial Sequence
  source: /note="Description of Artificial Sequence: Synthetic oligonucleotide"
gtcaactacgcaccagcagtc

SEQ ID NO: 41710 - DNA, 21 bp, Artificial Sequence
  source: /note="Description of Artificial Sequence: Synthetic oligonucleotide"
gtcaactacccagaaagcaca

SEQ ID NO: 41711 - DNA, 21 bp, Artificial Sequence
  source: /note="Description of Artificial Sequence: Synthetic oligonucleotide"
gtcccagcaatgacacaagga

SEQ ID NO: 41712 - DNA, 21 bp, Artificial Sequence
  source: /note="Description of Artificial Sequence: Synthetic oligonucleotide"
gtcccagcaccaggatacaac

SEQ ID NO: 41713 - DNA, 21 bp, Artificial Sequence
  source: /note="Description of Artificial Sequence: Synthetic oligonucleotide"
gtcccagcacaaagcagagaa

SEQ ID NO: 41714 - DNA, 21 bp, Artificial Sequence
  source: /note="Description of Artificial Sequence: Synthetic oligonucleotide"
gtcccagcaagaagcccagga

SEQ ID NO: 41715 - DNA, 21 bp, Artificial Sequence
  source: /note="Description of Artificial Sequence: Synthetic oligonucleotide"
gtcccagcaagcagcacaagc

SEQ ID NO: 41716 - DNA, 21 bp, Artificial Sequence
  source: /note="Description of Artificial Sequence: Synthetic oligonucleotide"
gtcccagcaacagacttcaga

SEQ ID NO: 41717 - DNA, 21 bp, Artificial Sequence
  source: /note="Description of Artificial Sequence: Synthetic oligonucleotide"
gtcccagcagtcacaagcaga

SEQ ID NO: 41718 - DNA, 21 bp, Artificial Sequence
  source: /note="Description of Artificial Sequence: Synthetic oligonucleotide"
gtcccatgcccaagccacaca

SEQ ID NO: 41719 - DNA, 21 bp, Artificial Sequence
  source: /note="Description of Artificial Sequence: Synthetic oligonucleotide"
gtcccagacgcaagcgacttc

SEQ ID NO: 41720 - DNA, 21 bp, Artificial Sequence
  source: /note="Description of Artificial Sequence: Synthetic oligonucleotide"
gtcccagacagctgggacaga

SEQ ID NO: 41721 - DNA, 21 bp, Artificial Sequence
  source: /note="Description of Artificial Sequence: Synthetic oligonucleotide"
gtcccagaaagagcaacaatc

SEQ ID NO: 41722 - DNA, 21 bp, Artificial Sequence
  source: /note="Description of Artificial Sequence: Synthetic oligonucleotide"
gtcccagaatacatcatcaca

SEQ ID NO: 41723 - DNA, 21 bp, Artificial Sequence
  source: /note="Description of Artificial Sequence: Synthetic oligonucleotide"
gtcccattcgcaagcatgaca

SEQ ID NO: 41724 - DNA, 21 bp, Artificial Sequence
  source: /note="Description of Artificial Sequence: Synthetic oligonucleotide"
gtcccattccaattcgaagga

SEQ ID NO: 41725 - DNA, 21 bp, Artificial Sequence
  source: /note="Description of Artificial Sequence: Synthetic oligonucleotide"
gtcccaggagcaaacagaatc

SEQ ID NO: 41726 - DNA, 21 bp, Artificial Sequence
  source: /note="Description of Artificial Sequence: Synthetic oligonucleotide"
gtcccaggagacctcagagtc

SEQ ID NO: 41727 - DNA, 21 bp, Artificial Sequence
  source: /note="Description of Artificial Sequence: Synthetic oligonucleotide"
gtcccaggaaaaccaggagac

SEQ ID NO: 41728 - DNA, 21 bp, Artificial Sequence
  source: /note="Description of Artificial Sequence: Synthetic oligonucleotide"
gtcccaggaatgacaacactc

SEQ ID NO: 41729 - DNA, 21 bp, Artificial Sequence
  source: /note="Description of Artificial Sequence: Synthetic oligonucleotide"
gtcccaggaaacccagcaaca

SEQ ID NO: 41730 - DNA, 21 bp, Artificial Sequence
  source: /note="Description of Artificial Sequence: Synthetic oligonucleotide"
gtcccaggaccagtcgtcgca

SEQ ID NO: 41731 - DNA, 21 bp, Artificial Sequence
  source: /note="Description of Artificial Sequence: Synthetic oligonucleotide"
gtcccaggaagaacaacacca

SEQ ID NO: 41732 - DNA, 21 bp, Artificial Sequence
  source: /note="Description of Artificial Sequence: Synthetic oligonucleotide"
gtcccaggaagcagaagcaca

SEQ ID NO: 41733 - DNA, 21 bp, Artificial Sequence
  source: /note="Description of Artificial Sequence: Synthetic oligonucleotide"
gtcccaggaagcagcagactc

SEQ ID NO: 41734 - DNA, 21 bp, Artificial Sequence
  source: /note="Description of Artificial Sequence: Synthetic oligonucleotide"
gtcccaggaagcagcagccac

SEQ ID NO: 41735 - DNA, 21 bp, Artificial Sequence
  source: /note="Description of Artificial Sequence: Synthetic oligonucleotide"
gtcccacacgaaaaaacacca

SEQ ID NO: 41736 - DNA, 21 bp, Artificial Sequence
  source: /note="Description of Artificial Sequence: Synthetic oligonucleotide"
gtcccacacatcgtcagcaca

SEQ ID NO: 41737 - DNA, 21 bp, Artificial Sequence
  source: /note="Description of Artificial Sequence: Synthetic oligonucleotide"
gtcccacacctcacaagcaca

SEQ ID NO: 41738 - DNA, 21 bp, Artificial Sequence
  source: /note="Description of Artificial Sequence: Synthetic oligonucleotide"
gtcccacacctcacagtcgtc

SEQ ID NO: 41739 - DNA, 21 bp, Artificial Sequence
  source: /note="Description of Artificial Sequence: Synthetic oligonucleotide"
gtcccacactacagcagcagc

SEQ ID NO: 41740 - DNA, 21 bp, Artificial Sequence
  source: /note="Description of Artificial Sequence: Synthetic oligonucleotide"
gtcccaatcatcagcgaccaa

SEQ ID NO: 41741 - DNA, 21 bp, Artificial Sequence
  source: /note="Description of Artificial Sequence: Synthetic oligonucleotide"
gtcccaaaattcccactcgaa

SEQ ID NO: 41742 - DNA, 21 bp, Artificial Sequence
  source: /note="Description of Artificial Sequence: Synthetic oligonucleotide"
gtcccaaaactcagctaccca

SEQ ID NO: 41743 - DNA, 21 bp, Artificial Sequence
  source: /note="Description of Artificial Sequence: Synthetic oligonucleotide"
gtcccaaaaaacgaaatggga

SEQ ID NO: 41744 - DNA, 21 bp, Artificial Sequence
  source: /note="Description of Artificial Sequence: Synthetic oligonucleotide"
gtcccaaaacaaagcatgcaa

SEQ ID NO: 41745 - DNA, 21 bp, Artificial Sequence
  source: /note="Description of Artificial Sequence: Synthetic oligonucleotide"
gtcccaaaacaaagcgtcaac

SEQ ID NO: 41746 - DNA, 21 bp, Artificial Sequence
  source: /note="Description of Artificial Sequence: Synthetic oligonucleotide"
gtcccaaaacaagtcagcttc

SEQ ID NO: 41747 - DNA, 21 bp, Artificial Sequence
  source: /note="Description of Artificial Sequence: Synthetic oligonucleotide"
gtcccactcgaccacgcagac

SEQ ID NO: 41748 - DNA, 21 bp, Artificial Sequence
  source: /note="Description of Artificial Sequence: Synthetic oligonucleotide"
gtcccactcgacagaatccac

SEQ ID NO: 41749 - DNA, 21 bp, Artificial Sequence
  source: /note="Description of Artificial Sequence: Synthetic oligonucleotide"
gtcccactcgacagcgaaagc

SEQ ID NO: 41750 - DNA, 21 bp, Artificial Sequence
  source: /note="Description of Artificial Sequence: Synthetic oligonucleotide"
gtcccactcggaacagacgtc

SEQ ID NO: 41751 - DNA, 21 bp, Artificial Sequence
  source: /note="Description of Artificial Sequence: Synthetic oligonucleotide"
gtcccactccacacaagcctc

SEQ ID NO: 41752 - DNA, 21 bp, Artificial Sequence
  source: /note="Description of Artificial Sequence: Synthetic oligonucleotide"
gtcccactcatcagcatggac

SEQ ID NO: 41753 - DNA, 21 bp, Artificial Sequence
  source: /note="Description of Artificial Sequence: Synthetic oligonucleotide"
gtcccactcaacaaagcagca

SEQ ID NO: 41754 - DNA, 21 bp, Artificial Sequence
  source: /note="Description of Artificial Sequence: Synthetic oligonucleotide"
gtcccactccaagaaacattc

SEQ ID NO: 41755 - DNA, 21 bp, Artificial Sequence
  source: /note="Description of Artificial Sequence: Synthetic oligonucleotide"
gtcccactcagcggaggattc

SEQ ID NO: 41756 - DNA, 21 bp, Artificial Sequence
  source: /note="Description of Artificial Sequence: Synthetic oligonucleotide"
gtcccactcagcaacatgagc

SEQ ID NO: 41757 - DNA, 21 bp, Artificial Sequence
  source: /note="Description of Artificial Sequence: Synthetic oligonucleotide"
gtcccactcagccaactcaac

SEQ ID NO: 41758 - DNA, 21 bp, Artificial Sequence
  source: /note="Description of Artificial Sequence: Synthetic oligonucleotide"
gtcccactcagcgtcacagtc

SEQ ID NO: 41759 - DNA, 21 bp, Artificial Sequence
  source: /note="Description of Artificial Sequence: Synthetic oligonucleotide"
gtcccactctacagcggaagc

SEQ ID NO: 41760 - DNA, 21 bp, Artificial Sequence
  source: /note="Description of Artificial Sequence: Synthetic oligonucleotide"
gtcccaatgcaaacagtcctc

SEQ ID NO: 41761 - DNA, 21 bp, Artificial Sequence
  source: /note="Description of Artificial Sequence: Synthetic oligonucleotide"
gtcccaatgagcggagcacca

SEQ ID NO: 41762 - DNA, 21 bp, Artificial Sequence
  source: /note="Description of Artificial Sequence: Synthetic oligonucleotide"
gtcccaatgagcagaccaagc

SEQ ID NO: 41763 - DNA, 21 bp, Artificial Sequence
  source: /note="Description of Artificial Sequence: Synthetic oligonucleotide"
gtcccaaacgacagactccaa

SEQ ID NO: 41764 - DNA, 21 bp, Artificial Sequence
  source: /note="Description of Artificial Sequence: Synthetic oligonucleotide"
gtcccaaaccacagcacagga

SEQ ID NO: 41765 - DNA, 21 bp, Artificial Sequence
  source: /note="Description of Artificial Sequence: Synthetic oligonucleotide"
gtcccaaacctcgaagacgac

SEQ ID NO: 41766 - DNA, 21 bp, Artificial Sequence
  source: /note="Description of Artificial Sequence: Synthetic oligonucleotide"
gtcccaccagcagcaagaagc

SEQ ID NO: 41767 - DNA, 21 bp, Artificial Sequence
  source: /note="Description of Artificial Sequence: Synthetic oligonucleotide"
gtcccaccagcaatccacgca

SEQ ID NO: 41768 - DNA, 21 bp, Artificial Sequence
  source: /note="Description of Artificial Sequence: Synthetic oligonucleotide"
gtcccaccaatcagcccaagc

SEQ ID NO: 41769 - DNA, 21 bp, Artificial Sequence
  source: /note="Description of Artificial Sequence: Synthetic oligonucleotide"
gtcccaccactcagacaagaa

SEQ ID NO: 41770 - DNA, 21 bp, Artificial Sequence
  source: /note="Description of Artificial Sequence: Synthetic oligonucleotide"
gtcccaccactcacaagcagc

SEQ ID NO: 41771 - DNA, 21 bp, Artificial Sequence
  source: /note="Description of Artificial Sequence: Synthetic oligonucleotide"
gtcccaccaagacacatcaac

SEQ ID NO: 41772 - DNA, 21 bp, Artificial Sequence
  source: /note="Description of Artificial Sequence: Synthetic oligonucleotide"
gtcccaccaagacaaacacac

SEQ ID NO: 41773 - DNA, 21 bp, Artificial Sequence
  source: /note="Description of Artificial Sequence: Synthetic oligonucleotide"
gtcccaccaagcagacaaagc

SEQ ID NO: 41774 - DNA, 21 bp, Artificial Sequence
  source: /note="Description of Artificial Sequence: Synthetic oligonucleotide"
gtcccaccaagcgtcagcaga

SEQ ID NO: 41775 - DNA, 21 bp, Artificial Sequence
  source: /note="Description of Artificial Sequence: Synthetic oligonucleotide"
gtcccaccagtccaaacacca

SEQ ID NO: 41776 - DNA, 21 bp, Artificial Sequence
  source: /note="Description of Artificial Sequence: Synthetic oligonucleotide"
gtcccaccatacagcgtccca

SEQ ID NO: 41777 - DNA, 21 bp, Artificial Sequence
  source: /note="Description of Artificial Sequence: Synthetic oligonucleotide"
gtcccacaaaaagtcacagtc

SEQ ID NO: 41778 - DNA, 21 bp, Artificial Sequence
  source: /note="Description of Artificial Sequence: Synthetic oligonucleotide"
gtcccaagagactacagatac

SEQ ID NO: 41779 - DNA, 21 bp, Artificial Sequence
  source: /note="Description of Artificial Sequence: Synthetic oligonucleotide"
gtcccaagagaaagagtcaac

SEQ ID NO: 41780 - DNA, 21 bp, Artificial Sequence
  source: /note="Description of Artificial Sequence: Synthetic oligonucleotide"
gtcccaagaggagacgcagca

SEQ ID NO: 41781 - DNA, 21 bp, Artificial Sequence
  source: /note="Description of Artificial Sequence: Synthetic oligonucleotide"
gtcccaagaaacgcaccagac

SEQ ID NO: 41782 - DNA, 21 bp, Artificial Sequence
  source: /note="Description of Artificial Sequence: Synthetic oligonucleotide"
gtcccaagaaacgtcacaatg

SEQ ID NO: 41783 - DNA, 21 bp, Artificial Sequence
  source: /note="Description of Artificial Sequence: Synthetic oligonucleotide"
gtcccaagaagcgacacactc

SEQ ID NO: 41784 - DNA, 21 bp, Artificial Sequence
  source: /note="Description of Artificial Sequence: Synthetic oligonucleotide"
gtcccaagaagcaacgtcagc

SEQ ID NO: 41785 - DNA, 21 bp, Artificial Sequence
  source: /note="Description of Artificial Sequence: Synthetic oligonucleotide"
gtcccaagaagccaactcaca

SEQ ID NO: 41786 - DNA, 21 bp, Artificial Sequence
  source: /note="Description of Artificial Sequence: Synthetic oligonucleotide"
gtcccaagaagcacaaacctc

SEQ ID NO: 41787 - DNA, 21 bp, Artificial Sequence
  source: /note="Description of Artificial Sequence: Synthetic oligonucleotide"
gtcccaagaacaggaagcaac

SEQ ID NO: 41788 - DNA, 21 bp, Artificial Sequence
  source: /note="Description of Artificial Sequence: Synthetic oligonucleotide"
gtcccaagaacactcacacca

SEQ ID NO: 41789 - DNA, 21 bp, Artificial Sequence
  source: /note="Description of Artificial Sequence: Synthetic oligonucleotide"
gtcccaagcgcaacaaaaatc

SEQ ID NO: 41790 - DNA, 21 bp, Artificial Sequence
  source: /note="Description of Artificial Sequence: Synthetic oligonucleotide"
gtcccaagccacatcggagca

SEQ ID NO: 41791 - DNA, 21 bp, Artificial Sequence
  source: /note="Description of Artificial Sequence: Synthetic oligonucleotide"
gtcccaagcaaaccaagctac

SEQ ID NO: 41792 - DNA, 21 bp, Artificial Sequence
  source: /note="Description of Artificial Sequence: Synthetic oligonucleotide"
gtcccaagcaaaacaccattc

SEQ ID NO: 41793 - DNA, 21 bp, Artificial Sequence
  source: /note="Description of Artificial Sequence: Synthetic oligonucleotide"
gtcccaagcccaagcagcagc

SEQ ID NO: 41794 - DNA, 21 bp, Artificial Sequence
  source: /note="Description of Artificial Sequence: Synthetic oligonucleotide"
gtcccaagcagaagccaaaac

SEQ ID NO: 41795 - DNA, 21 bp, Artificial Sequence
  source: /note="Description of Artificial Sequence: Synthetic oligonucleotide"
gtcccaagcagcatcagcagc

SEQ ID NO: 41796 - DNA, 21 bp, Artificial Sequence
  source: /note="Description of Artificial Sequence: Synthetic oligonucleotide"
gtcccaagcgtcccaggagca

SEQ ID NO: 41797 - DNA, 21 bp, Artificial Sequence
  source: /note="Description of Artificial Sequence: Synthetic oligonucleotide"
gtcccaagcgtcgtcagaagc

SEQ ID NO: 41798 - DNA, 21 bp, Artificial Sequence
  source: /note="Description of Artificial Sequence: Synthetic oligonucleotide"
gtcccaacagcactcatgagc

SEQ ID NO: 41799 - DNA, 21 bp, Artificial Sequence
  source: /note="Description of Artificial Sequence: Synthetic oligonucleotide"
gtcccaacagactacctcagc

SEQ ID NO: 41800 - DNA, 21 bp, Artificial Sequence
  source: /note="Description of Artificial Sequence: Synthetic oligonucleotide"
gtcccaacacactacgaccca

SEQ ID NO: 41801 - DNA, 21 bp, Artificial Sequence
  source: /note="Description of Artificial Sequence: Synthetic oligonucleotide"
gtcccaacaagaggagaattc

SEQ ID NO: 41802 - DNA, 21 bp, Artificial Sequence
  source: /note="Description of Artificial Sequence: Synthetic oligonucleotide"
gtcccaacaagcgcagtcaaa

SEQ ID NO: 41803 - DNA, 21 bp, Artificial Sequence
  source: /note="Description of Artificial Sequence: Synthetic oligonucleotide"
gtcccaacaacaagcgacttc

SEQ ID NO: 41804 - DNA, 21 bp, Artificial Sequence
  source: /note="Description of Artificial Sequence: Synthetic oligonucleotide"
gtcccaacagtcagcaacatc

SEQ ID NO: 41805 - DNA, 21 bp, Artificial Sequence
  source: /note="Description of Artificial Sequence: Synthetic oligonucleotide"
gtcccagtcgacatcctcagc

SEQ ID NO: 41806 - DNA, 21 bp, Artificial Sequence
  source: /note="Description of Artificial Sequence: Synthetic oligonucleotide"
gtcccagtcaaaacaagccca

SEQ ID NO: 41807 - DNA, 21 bp, Artificial Sequence
  source: /note="Description of Artificial Sequence: Synthetic oligonucleotide"
gtcccagtcaaaacaacatac

SEQ ID NO: 41808 - DNA, 21 bp, Artificial Sequence
  source: /note="Description of Artificial Sequence: Synthetic oligonucleotide"
gtcccagtcaacccaagagca

SEQ ID NO: 41809 - DNA, 21 bp, Artificial Sequence
  source: /note="Description of Artificial Sequence: Synthetic oligonucleotide"
gtcccagtcagcagagcattc

SEQ ID NO: 41810 - DNA, 21 bp, Artificial Sequence
  source: /note="Description of Artificial Sequence: Synthetic oligonucleotide"
gtcccatgggacagcccagtc

SEQ ID NO: 41811 - DNA, 21 bp, Artificial Sequence
  source: /note="Description of Artificial Sequence: Synthetic oligonucleotide"
gtcccatacggacaagtccac

SEQ ID NO: 41812 - DNA, 21 bp, Artificial Sequence
  source: /note="Description of Artificial Sequence: Synthetic oligonucleotide"
gtcccatacagcagcctccca

SEQ ID NO: 41813 - DNA, 21 bp, Artificial Sequence
  source: /note="Description of Artificial Sequence: Synthetic oligonucleotide"
gtcccatacacaggaatgaca

SEQ ID NO: 41814 - DNA, 21 bp, Artificial Sequence
  source: /note="Description of Artificial Sequence: Synthetic oligonucleotide"
gtcccatacacaagcacagac

SEQ ID NO: 41815 - DNA, 21 bp, Artificial Sequence
  source: /note="Description of Artificial Sequence: Synthetic oligonucleotide"
gtccaagcaggactcagaagc

SEQ ID NO: 41816 - DNA, 21 bp, Artificial Sequence
  source: /note="Description of Artificial Sequence: Synthetic oligonucleotide"
gtccaagcaagcagcatgaaa

SEQ ID NO: 41817 - DNA, 21 bp, Artificial Sequence
  source: /note="Description of Artificial Sequence: Synthetic oligonucleotide"
gtccaagacacagacagcaca

SEQ ID NO: 41818 - DNA, 21 bp, Artificial Sequence
  source: /note="Description of Artificial Sequence: Synthetic oligonucleotide"
gtccaagaaccagtcgtcatg

SEQ ID NO: 41819 - DNA, 21 bp, Artificial Sequence
  source: /note="Description of Artificial Sequence: Synthetic oligonucleotide"
gtccaaggaggaagcaacaca

SEQ ID NO: 41820 - DNA, 21 bp, Artificial Sequence
  source: /note="Description of Artificial Sequence: Synthetic oligonucleotide"
gtccaaggaagactcgcagga

SEQ ID NO: 41821 - DNA, 21 bp, Artificial Sequence
  source: /note="Description of Artificial Sequence: Synthetic oligonucleotide"
gtccaaggaagaagcggaatg

SEQ ID NO: 41822 - DNA, 21 bp, Artificial Sequence
  source: /note="Description of Artificial Sequence: Synthetic oligonucleotide"
gtccaaggaagcaaaccagaa

SEQ ID NO: 41823 - DNA, 21 bp, Artificial Sequence
  source: /note="Description of Artificial Sequence: Synthetic oligonucleotide"
gtccaaggaacactcccaagc

SEQ ID NO: 41824 - DNA, 21 bp, Artificial Sequence
  source: /note="Description of Artificial Sequence: Synthetic oligonucleotide"
gtccaacacctcagagcaaca

SEQ ID NO: 41825 - DNA, 21 bp, Artificial Sequence
  source: /note="Description of Artificial Sequence: Synthetic oligonucleotide"
gtccaacacccaacaagagca

SEQ ID NO: 41826 - DNA, 21 bp, Artificial Sequence
  source: /note="Description of Artificial Sequence: Synthetic oligonucleotide"
gtccaacacagaatggaagtc

SEQ ID NO: 41827 - DNA, 21 bp, Artificial Sequence
  source: /note="Description of Artificial Sequence: Synthetic oligonucleotide"
gtccaacacgtcgcagaactc

SEQ ID NO: 41828 - DNA, 21 bp, Artificial Sequence
  source: /note="Description of Artificial Sequence: Synthetic oligonucleotide"
gtccaactcgcaagcaacagc

SEQ ID NO: 41829 - DNA, 21 bp, Artificial Sequence
  source: /note="Description of Artificial Sequence: Synthetic oligonucleotide"
gtccaactcggaggacacgtc

SEQ ID NO: 41830 - DNA, 21 bp, Artificial Sequence
  source: /note="Description of Artificial Sequence: Synthetic oligonucleotide"
gtccaaatggaaagacacagc

SEQ ID NO: 41831 - DNA, 21 bp, Artificial Sequence
  source: /note="Description of Artificial Sequence: Synthetic oligonucleotide"
gtccaaatgatgagagacgca

SEQ ID NO: 41832 - DNA, 21 bp, Artificial Sequence
  source: /note="Description of Artificial Sequence: Synthetic oligonucleotide"
gtccaaaacgtcatcggacca

SEQ ID NO: 41833 - DNA, 21 bp, Artificial Sequence
  source: /note="Description of Artificial Sequence: Synthetic oligonucleotide"
gtccaaccagaaatcctcgca

SEQ ID NO: 41834 - DNA, 21 bp, Artificial Sequence
  source: /note="Description of Artificial Sequence: Synthetic oligonucleotide"
gtccaaccaggaccactcgtc

SEQ ID NO: 41835 - DNA, 21 bp, Artificial Sequence
  source: /note="Description of Artificial Sequence: Synthetic oligonucleotide"
gtccaaccaatcaaccaaagc

SEQ ID NO: 41836 - DNA, 21 bp, Artificial Sequence
  source: /note="Description of Artificial Sequence: Synthetic oligonucleotide"
gtccaaccactcccagcacac

SEQ ID NO: 41837 - DNA, 21 bp, Artificial Sequence
  source: /note="Description of Artificial Sequence: Synthetic oligonucleotide"
gtccaaccaatgatcagcaac

SEQ ID NO: 41838 - DNA, 21 bp, Artificial Sequence
  source: /note="Description of Artificial Sequence: Synthetic oligonucleotide"
gtccaaccaagagaatacgtc

SEQ ID NO: 41839 - DNA, 21 bp, Artificial Sequence
  source: /note="Description of Artificial Sequence: Synthetic oligonucleotide"
gtccaaccagtccaaagcgac

SEQ ID NO: 41840 - DNA, 21 bp, Artificial Sequence
  source: /note="Description of Artificial Sequence: Synthetic oligonucleotide"
gtccaacaaaaaggactcgca

SEQ ID NO: 41841 - DNA, 21 bp, Artificial Sequence
  source: /note="Description of Artificial Sequence: Synthetic oligonucleotide"
gtccaaagaatgatgggacca

SEQ ID NO: 41842 - DNA, 21 bp, Artificial Sequence
  source: /note="Description of Artificial Sequence: Synthetic oligonucleotide"
gtccaaagcgacagcacaagc

SEQ ID NO: 41843 - DNA, 21 bp, Artificial Sequence
  source: /note="Description of Artificial Sequence: Synthetic oligonucleotide"
gtccaaagcatcccaagcgca

SEQ ID NO: 41844 - DNA, 21 bp, Artificial Sequence
  source: /note="Description of Artificial Sequence: Synthetic oligonucleotide"
gtccaaagcctccacacagga

SEQ ID NO: 41845 - DNA, 21 bp, Artificial Sequence
  source: /note="Description of Artificial Sequence: Synthetic oligonucleotide"
gtccaaagcccaacatgggtc

SEQ ID NO: 41846 - DNA, 21 bp, Artificial Sequence
  source: /note="Description of Artificial Sequence: Synthetic oligonucleotide"
gtccaaagcagaccagacagc

SEQ ID NO: 41847 - DNA, 21 bp, Artificial Sequence
  source: /note="Description of Artificial Sequence: Synthetic oligonucleotide"
gtccaaagcagcgtcacactc

SEQ ID NO: 41848 - DNA, 21 bp, Artificial Sequence
  source: /note="Description of Artificial Sequence: Synthetic oligonucleotide"
gtccaaagcacactcctcgaa

SEQ ID NO: 41849 - DNA, 21 bp, Artificial Sequence
  source: /note="Description of Artificial Sequence: Synthetic oligonucleotide"
gtccaaagcgtcatgccacac

SEQ ID NO: 41850 - DNA, 21 bp, Artificial Sequence
  source: /note="Description of Artificial Sequence: Synthetic oligonucleotide"
gtccaaagcgtcagaatcagc

SEQ ID NO: 41851 - DNA, 21 bp, Artificial Sequence
  source: /note="Description of Artificial Sequence: Synthetic oligonucleotide"
gtccaaacagcaccagcagaa

SEQ ID NO: 41852 - DNA, 21 bp, Artificial Sequence
  source: /note="Description of Artificial Sequence: Synthetic oligonucleotide"
gtccaaacacacagcgcagca

SEQ ID NO: 41853 - DNA, 21 bp, Artificial Sequence
  source: /note="Description of Artificial Sequence: Synthetic oligonucleotide"
gtccaaacacaaccatacaga

SEQ ID NO: 41854 - DNA, 21 bp, Artificial Sequence
  source: /note="Description of Artificial Sequence: Synthetic oligonucleotide"
gtccaaacaagcggatacctc

SEQ ID NO: 41855 - DNA, 21 bp, Artificial Sequence
  source: /note="Description of Artificial Sequence: Synthetic oligonucleotide"
gtccaatacatgagcaaagca

SEQ ID NO: 41856 - DNA, 21 bp, Artificial Sequence
  source: /note="Description of Artificial Sequence: Synthetic oligonucleotide"
gtccaatacccaacagaaagc

SEQ ID NO: 41857 - DNA, 21 bp, Artificial Sequence
  source: /note="Description of Artificial Sequence: Synthetic oligonucleotide"
gtccaatacagcggaacacca

SEQ ID NO: 41858 - DNA, 21 bp, Artificial Sequence
  source: /note="Description of Artificial Sequence: Synthetic oligonucleotide"
gtcagagcagacgcagcagga

SEQ ID NO: 41859 - DNA, 21 bp, Artificial Sequence
  source: /note="Description of Artificial Sequence: Synthetic oligonucleotide"
gtcagagcactcccactcagc

SEQ ID NO: 41860 - DNA, 21 bp, Artificial Sequence
  source: /note="Description of Artificial Sequence: Synthetic oligonucleotide"
gtcagagcaaacccaagcaca

SEQ ID NO: 41861 - DNA, 21 bp, Artificial Sequence
  source: /note="Description of Artificial Sequence: Synthetic oligonucleotide"
gtcagagcaccaccaaacgca

SEQ ID NO: 41862 - DNA, 21 bp, Artificial Sequence
  source: /note="Description of Artificial Sequence: Synthetic oligonucleotide"
gtcagagcaccaccaagcctc

SEQ ID NO: 41863 - DNA, 21 bp, Artificial Sequence
  source: /note="Description of Artificial Sequence: Synthetic oligonucleotide"
gtcagagcaccaagagaagtc

SEQ ID NO: 41864 - DNA, 21 bp, Artificial Sequence
  source: /note="Description of Artificial Sequence: Synthetic oligonucleotide"
gtcagagcaagcaacacactc

SEQ ID NO: 41865 - DNA, 21 bp, Artificial Sequence
  source: /note="Description of Artificial Sequence: Synthetic oligonucleotide"
gtcagagcaacacaaacagaa

SEQ ID NO: 41866 - DNA, 21 bp, Artificial Sequence
  source: /note="Description of Artificial Sequence: Synthetic oligonucleotide"
gtcagagcagtccacccagtc

SEQ ID NO: 41867 - DNA, 21 bp, Artificial Sequence
  source: /note="Description of Artificial Sequence: Synthetic oligonucleotide"
gtcagagcagtccaaatcaac

SEQ ID NO: 41868 - DNA, 21 bp, Artificial Sequence
  source: /note="Description of Artificial Sequence: Synthetic oligonucleotide"
gtcagagacgcagcaagctgc

SEQ ID NO: 41869 - DNA, 21 bp, Artificial Sequence
  source: /note="Description of Artificial Sequence: Synthetic oligonucleotide"
gtcagagacgacgtcggatgg

SEQ ID NO: 41870 - DNA, 21 bp, Artificial Sequence
  source: /note="Description of Artificial Sequence: Synthetic oligonucleotide"
gtcagagacccagtcacaagc

SEQ ID NO: 41871 - DNA, 21 bp, Artificial Sequence
  source: /note="Description of Artificial Sequence: Synthetic oligonucleotide"
gtcagagacagcatgcacagc

SEQ ID NO: 41872 - DNA, 21 bp, Artificial Sequence
  source: /note="Description of Artificial Sequence: Synthetic oligonucleotide"
gtcagagacacaatgggacaa

SEQ ID NO: 41873 - DNA, 21 bp, Artificial Sequence
  source: /note="Description of Artificial Sequence: Synthetic oligonucleotide"
gtcagagactggcaaacacaa

SEQ ID NO: 41874 - DNA, 21 bp, Artificial Sequence
  source: /note="Description of Artificial Sequence: Synthetic oligonucleotide"
gtcagagaagcaacaagcctc

SEQ ID NO: 41875 - DNA, 21 bp, Artificial Sequence
  source: /note="Description of Artificial Sequence: Synthetic oligonucleotide"
gtcagagaagtcctcggaagc

SEQ ID NO: 41876 - DNA, 21 bp, Artificial Sequence
  source: /note="Description of Artificial Sequence: Synthetic oligonucleotide"
gtcagattcaacgaacaagca

SEQ ID NO: 41877 - DNA, 21 bp, Artificial Sequence
  source: /note="Description of Artificial Sequence: Synthetic oligonucleotide"
gtcagattcaacggacaaaca

SEQ ID NO: 41878 - DNA, 21 bp, Artificial Sequence
  source: /note="Description of Artificial Sequence: Synthetic oligonucleotide"
gtcagaggagcactcacacca

SEQ ID NO: 41879 - DNA, 21 bp, Artificial Sequence
  source: /note="Description of Artificial Sequence: Synthetic oligonucleotide"
gtcagaggagcagtcgcagca

SEQ ID NO: 41880 - DNA, 21 bp, Artificial Sequence
  source: /note="Description of Artificial Sequence: Synthetic oligonucleotide"
gtcagaggaatcgtcgcacca

SEQ ID NO: 41881 - DNA, 21 bp, Artificial Sequence
  source: /note="Description of Artificial Sequence: Synthetic oligonucleotide"
gtcagaggaccagaaatgaca

SEQ ID NO: 41882 - DNA, 21 bp, Artificial Sequence
  source: /note="Description of Artificial Sequence: Synthetic oligonucleotide"
gtcagaggaccaggagaagac

SEQ ID NO: 41883 - DNA, 21 bp, Artificial Sequence
  source: /note="Description of Artificial Sequence: Synthetic oligonucleotide"
gtcagaggaccacacgacaca

SEQ ID NO: 41884 - DNA, 21 bp, Artificial Sequence
  source: /note="Description of Artificial Sequence: Synthetic oligonucleotide"
gtcagaggaagcctcagcatg

SEQ ID NO: 41885 - DNA, 21 bp, Artificial Sequence
  source: /note="Description of Artificial Sequence: Synthetic oligonucleotide"
gtcagaggaagcctcacaagc

SEQ ID NO: 41886 - DNA, 21 bp, Artificial Sequence
  source: /note="Description of Artificial Sequence: Synthetic oligonucleotide"
gtcagaggaagccaatacgca

SEQ ID NO: 41887 - DNA, 21 bp, Artificial Sequence
  source: /note="Description of Artificial Sequence: Synthetic oligonucleotide"
gtcagaggaagcacacaagca

SEQ ID NO: 41888 - DNA, 21 bp, Artificial Sequence
  source: /note="Description of Artificial Sequence: Synthetic oligonucleotide"
gtcagaggagtccaactcgac

SEQ ID NO: 41889 - DNA, 21 bp, Artificial Sequence
  source: /note="Description of Artificial Sequence: Synthetic oligonucleotide"
gtcagaggagtcagcgacagc

SEQ ID NO: 41890 - DNA, 21 bp, Artificial Sequence
  source: /note="Description of Artificial Sequence: Synthetic oligonucleotide"
gtcagacacatcaaactcgaa

SEQ ID NO: 41891 - DNA, 21 bp, Artificial Sequence
  source: /note="Description of Artificial Sequence: Synthetic oligonucleotide"
gtcagacacccaggaccagaa

SEQ ID NO: 41892 - DNA, 21 bp, Artificial Sequence
  source: /note="Description of Artificial Sequence: Synthetic oligonucleotide"
gtcagaaaagactaccacctc

SEQ ID NO: 41893 - DNA, 21 bp, Artificial Sequence
  source: /note="Description of Artificial Sequence: Synthetic oligonucleotide"
gtcagactcgacgcaagcatc

SEQ ID NO: 41894 - DNA, 21 bp, Artificial Sequence
  source: /note="Description of Artificial Sequence: Synthetic oligonucleotide"
gtcagactcgacatggcagca

SEQ ID NO: 41895 - DNA, 21 bp, Artificial Sequence
  source: /note="Description of Artificial Sequence: Synthetic oligonucleotide"
gtcagactcgacagagaagga

SEQ ID NO: 41896 - DNA, 21 bp, Artificial Sequence
  source: /note="Description of Artificial Sequence: Synthetic oligonucleotide"
gtcagactcccagacacaagc

SEQ ID NO: 41897 - DNA, 21 bp, Artificial Sequence
  source: /note="Description of Artificial Sequence: Synthetic oligonucleotide"
gtcagactccaaggaggactc

SEQ ID NO: 41898 - DNA, 21 bp, Artificial Sequence
  source: /note="Description of Artificial Sequence: Synthetic oligonucleotide"
gtcagactcagcgaagtccca

SEQ ID NO: 41899 - DNA, 21 bp, Artificial Sequence
  source: /note="Description of Artificial Sequence: Synthetic oligonucleotide"
gtcagaatgctcccaggagac

SEQ ID NO: 41900 - DNA, 21 bp, Artificial Sequence
  source: /note="Description of Artificial Sequence: Synthetic oligonucleotide"
gtcagaaacgcaccaggagca

SEQ ID NO: 41901 - DNA, 21 bp, Artificial Sequence
  source: /note="Description of Artificial Sequence: Synthetic oligonucleotide"
gtcagaaacgcaagcgacctc

SEQ ID NO: 41902 - DNA, 21 bp, Artificial Sequence
  source: /note="Description of Artificial Sequence: Synthetic oligonucleotide"
gtcagaaacatcccaagcatg

SEQ ID NO: 41903 - DNA, 21 bp, Artificial Sequence
  source: /note="Description of Artificial Sequence: Synthetic oligonucleotide"
gtcagaaacagcgcaatgaac

SEQ ID NO: 41904 - DNA, 21 bp, Artificial Sequence
  source: /note="Description of Artificial Sequence: Synthetic oligonucleotide"
gtcagaccagcagaccaattc

SEQ ID NO: 41905 - DNA, 21 bp, Artificial Sequence
  source: /note="Description of Artificial Sequence: Synthetic oligonucleotide"
gtcagaccagaaagagaaaac

SEQ ID NO: 41906 - DNA, 21 bp, Artificial Sequence
  source: /note="Description of Artificial Sequence: Synthetic oligonucleotide"
gtcagaccaggaaaactcatc

SEQ ID NO: 41907 - DNA, 21 bp, Artificial Sequence
  source: /note="Description of Artificial Sequence: Synthetic oligonucleotide"
gtcagaccacacatgacagtc

SEQ ID NO: 41908 - DNA, 21 bp, Artificial Sequence
  source: /note="Description of Artificial Sequence: Synthetic oligonucleotide"
gtcagaccaatcccaccaaac

SEQ ID NO: 41909 - DNA, 21 bp, Artificial Sequence
  source: /note="Description of Artificial Sequence: Synthetic oligonucleotide"
gtcagaccactcagcatcgga

SEQ ID NO: 41910 - DNA, 21 bp, Artificial Sequence
  source: /note="Description of Artificial Sequence: Synthetic oligonucleotide"
gtcagaccacaaacagcatac

SEQ ID NO: 41911 - DNA, 21 bp, Artificial Sequence
  source: /note="Description of Artificial Sequence: Synthetic oligonucleotide"
gtcagaccaagagacggaatg

SEQ ID NO: 41912 - DNA, 21 bp, Artificial Sequence
  source: /note="Description of Artificial Sequence: Synthetic oligonucleotide"
gtcagaccaagcatcctcgca

SEQ ID NO: 41913 - DNA, 21 bp, Artificial Sequence
  source: /note="Description of Artificial Sequence: Synthetic oligonucleotide"
gtcagaccaagcagcctcgaa

SEQ ID NO: 41914 - DNA, 21 bp, Artificial Sequence
  source: /note="Description of Artificial Sequence: Synthetic oligonucleotide"
gtcagaccaacaaacagcgga

SEQ ID NO: 41915 - DNA, 21 bp, Artificial Sequence
  source: /note="Description of Artificial Sequence: Synthetic oligonucleotide"
gtcagaccaacacaaaacagc

SEQ ID NO: 41916 - DNA, 21 bp, Artificial Sequence
  source: /note="Description of Artificial Sequence: Synthetic oligonucleotide"
gtcagaccagtcaaagaagtc

SEQ ID NO: 41917 - DNA, 21 bp, Artificial Sequence
  source: /note="Description of Artificial Sequence: Synthetic oligonucleotide"
gtcagaccagtcaacggagtc

SEQ ID NO: 41918 - DNA, 21 bp, Artificial Sequence
  source: /note="Description of Artificial Sequence: Synthetic oligonucleotide"
gtcagacaagaaatcatcagc

SEQ ID NO: 41919 - DNA, 21 bp, Artificial Sequence
  source: /note="Description of Artificial Sequence: Synthetic oligonucleotide"
gtcagacaaatgacaccagga

SEQ ID NO: 41920 - DNA, 21 bp, Artificial Sequence
  source: /note="Description of Artificial Sequence: Synthetic oligonucleotide"
gtcagacaaccaggagtcgac

SEQ ID NO: 41921 - DNA, 21 bp, Artificial Sequence
  source: /note="Description of Artificial Sequence: Synthetic oligonucleotide"
gtcagacaaagcagcaacaca

SEQ ID NO: 41922 - DNA, 21 bp, Artificial Sequence
  source: /note="Description of Artificial Sequence: Synthetic oligonucleotide"
gtcagaagagtcgcaagcgaa

SEQ ID NO: 41923 - DNA, 21 bp, Artificial Sequence
  source: /note="Description of Artificial Sequence: Synthetic oligonucleotide"
gtcagaagcgcaatcagcgac

SEQ ID NO: 41924 - DNA, 21 bp, Artificial Sequence
  source: /note="Description of Artificial Sequence: Synthetic oligonucleotide"
gtcagaagcgcaacattccac

SEQ ID NO: 41925 - DNA, 21 bp, Artificial Sequence
  source: /note="Description of Artificial Sequence: Synthetic oligonucleotide"
gtcagaagcctcgaacaaagc

SEQ ID NO: 41926 - DNA, 21 bp, Artificial Sequence
  source: /note="Description of Artificial Sequence: Synthetic oligonucleotide"
gtcagaagcccaagccactgc

SEQ ID NO: 41927 - DNA, 21 bp, Artificial Sequence
  source: /note="Description of Artificial Sequence: Synthetic oligonucleotide"
gtcagaagccaactcccacca

SEQ ID NO: 41928 - DNA, 21 bp, Artificial Sequence
  source: /note="Description of Artificial Sequence: Synthetic oligonucleotide"
gtcagaagcagcctcgacaga

SEQ ID NO: 41929 - DNA, 21 bp, Artificial Sequence
  source: /note="Description of Artificial Sequence: Synthetic oligonucleotide"
gtcagaagcagcacatacaca

SEQ ID NO: 41930 - DNA, 21 bp, Artificial Sequence
  source: /note="Description of Artificial Sequence: Synthetic oligonucleotide"
gtcagaagcgtcgcaccagaa

SEQ ID NO: 41931 - DNA, 21 bp, Artificial Sequence
  source: /note="Description of Artificial Sequence: Synthetic oligonucleotide"
gtcagaacactcccaagccca

SEQ ID NO: 41932 - DNA, 21 bp, Artificial Sequence
  source: /note="Description of Artificial Sequence: Synthetic oligonucleotide"
gtcagaacaatgccacacagc

SEQ ID NO: 41933 - DNA, 21 bp, Artificial Sequence
  source: /note="Description of Artificial Sequence: Synthetic oligonucleotide"
gtcagaacaccattcgaagca

SEQ ID NO: 41934 - DNA, 21 bp, Artificial Sequence
  source: /note="Description of Artificial Sequence: Synthetic oligonucleotide"
gtcagaacacaaggactcagc

SEQ ID NO: 41935 - DNA, 21 bp, Artificial Sequence
  source: /note="Description of Artificial Sequence: Synthetic oligonucleotide"
gtcagaacacaaggaacaaac

SEQ ID NO: 41936 - DNA, 21 bp, Artificial Sequence
  source: /note="Description of Artificial Sequence: Synthetic oligonucleotide"
gtcagaacaagcatcggaaca

SEQ ID NO: 41937 - DNA, 21 bp, Artificial Sequence
  source: /note="Description of Artificial Sequence: Synthetic oligonucleotide"
gtcagaacaagcccaatgagc

SEQ ID NO: 41938 - DNA, 21 bp, Artificial Sequence
  source: /note="Description of Artificial Sequence: Synthetic oligonucleotide"
gtcagagtcgcagtcccaatg

SEQ ID NO: 41939 - DNA, 21 bp, Artificial Sequence
  source: /note="Description of Artificial Sequence: Synthetic oligonucleotide"
gtcagagtcggaacaatcgga

SEQ ID NO: 41940 - DNA, 21 bp, Artificial Sequence
  source: /note="Description of Artificial Sequence: Synthetic oligonucleotide"
gtcagagtcggaacactcaac

SEQ ID NO: 41941 - DNA, 21 bp, Artificial Sequence
  source: /note="Description of Artificial Sequence: Synthetic oligonucleotide"
gtcagagtcatgggaagcagc

SEQ ID NO: 41942 - DNA, 21 bp, Artificial Sequence
  source: /note="Description of Artificial Sequence: Synthetic oligonucleotide"
gtcagcgcagcaagcctcaca

SEQ ID NO: 41943 - DNA, 21 bp, Artificial Sequence
  source: /note="Description of Artificial Sequence: Synthetic oligonucleotide"
gtcagcgcagcaacaagcttc

SEQ ID NO: 41944 - DNA, 21 bp, Artificial Sequence
  source: /note="Description of Artificial Sequence: Synthetic oligonucleotide"
gtcagcgcacacacaaacagc

SEQ ID NO: 41945 - DNA, 21 bp, Artificial Sequence
  source: /note="Description of Artificial Sequence: Synthetic oligonucleotide"
gtcagcgcaatcatggacgtc

SEQ ID NO: 41946 - DNA, 21 bp, Artificial Sequence
  source: /note="Description of Artificial Sequence: Synthetic oligonucleotide"
gtcagcgcaatcagcgcaaca

SEQ ID NO: 41947 - DNA, 21 bp, Artificial Sequence
  source: /note="Description of Artificial Sequence: Synthetic oligonucleotide"
gtcagcgcaccagaagaccac

SEQ ID NO: 41948 - DNA, 21 bp, Artificial Sequence
  source: /note="Description of Artificial Sequence: Synthetic oligonucleotide"
gtcagcgcacaaatcagcatc

SEQ ID NO: 41949 - DNA, 21 bp, Artificial Sequence
  source: /note="Description of Artificial Sequence: Synthetic oligonucleotide"
gtcagcgcaagagaaagcgtc

SEQ ID NO: 41950 - DNA, 21 bp, Artificial Sequence
  source: /note="Description of Artificial Sequence: Synthetic oligonucleotide"
gtcagcgcaagaagcttccaa

SEQ ID NO: 41951 - DNA, 21 bp, Artificial Sequence
  source: /note="Description of Artificial Sequence: Synthetic oligonucleotide"
gtcagcgcaagcgcaggaaga

SEQ ID NO: 41952 - DNA, 21 bp, Artificial Sequence
  source: /note="Description of Artificial Sequence: Synthetic oligonucleotide"
gtcagcgcaagcctcgcactc

SEQ ID NO: 41953 - DNA, 21 bp, Artificial Sequence
  source: /note="Description of Artificial Sequence: Synthetic oligonucleotide"
gtcagcgcaagcagcagcgca

SEQ ID NO: 41954 - DNA, 21 bp, Artificial Sequence
  source: /note="Description of Artificial Sequence: Synthetic oligonucleotide"
gtcagcgcaacacacgtccaa

SEQ ID NO: 41955 - DNA, 21 bp, Artificial Sequence
  source: /note="Description of Artificial Sequence: Synthetic oligonucleotide"
gtcagcgcaacaacaagcgtc

SEQ ID NO: 41956 - DNA, 21 bp, Artificial Sequence
  source: /note="Description of Artificial Sequence: Synthetic oligonucleotide"
gtcagcgacgacaaaagcagc

SEQ ID NO: 41957 - DNA, 21 bp, Artificial Sequence
  source: /note="Description of Artificial Sequence: Synthetic oligonucleotide"
gtcagcgacggaaacaaactc

SEQ ID NO: 41958 - DNA, 21 bp, Artificial Sequence
  source: /note="Description of Artificial Sequence: Synthetic oligonucleotide"
gtcagcgacaacctctggagc

SEQ ID NO: 41959 - DNA, 21 bp, Artificial Sequence
  source: /note="Description of Artificial Sequence: Synthetic oligonucleotide"
gtcagcgacagctaccaatgg

SEQ ID NO: 41960 - DNA, 21 bp, Artificial Sequence
  source: /note="Description of Artificial Sequence: Synthetic oligonucleotide"
gtcagcgacgtcgcattctac

SEQ ID NO: 41961 - DNA, 21 bp, Artificial Sequence
  source: /note="Description of Artificial Sequence: Synthetic oligonucleotide"
gtcagcgacgtcacaagcgac

SEQ ID NO: 41962 - DNA, 21 bp, Artificial Sequence
  source: /note="Description of Artificial Sequence: Synthetic oligonucleotide"
gtcagcgactacctcacacaa

SEQ ID NO: 41963 - DNA, 21 bp, Artificial Sequence
  source: /note="Description of Artificial Sequence: Synthetic oligonucleotide"
gtcagcttcccatacgaagaa

SEQ ID NO: 41964 - DNA, 21 bp, Artificial Sequence
  source: /note="Description of Artificial Sequence: Synthetic oligonucleotide"
gtcagcttccaaccactcgga

SEQ ID NO: 41965 - DNA, 21 bp, Artificial Sequence
  source: /note="Description of Artificial Sequence: Synthetic oligonucleotide"
gtcagcggattcaaccaacac

SEQ ID NO: 41966 - DNA, 21 bp, Artificial Sequence
  source: /note="Description of Artificial Sequence: Synthetic oligonucleotide"
gtcagcggaccaaaccactac

SEQ ID NO: 41967 - DNA, 21 bp, Artificial Sequence
  source: /note="Description of Artificial Sequence: Synthetic oligonucleotide"
gtcagcggaagcctccaatac

SEQ ID NO: 41968 - DNA, 21 bp, Artificial Sequence
  source: /note="Description of Artificial Sequence: Synthetic oligonucleotide"
gtcagcggaagcacaagaaca

SEQ ID NO: 41969 - DNA, 21 bp, Artificial Sequence
  source: /note="Description of Artificial Sequence: Synthetic oligonucleotide"
gtcagccacgcaacacaccaa

SEQ ID NO: 41970 - DNA, 21 bp, Artificial Sequence
  source: /note="Description of Artificial Sequence: Synthetic oligonucleotide"
gtcagccacggaatgaacatg

SEQ ID NO: 41971 - DNA, 21 bp, Artificial Sequence
  source: /note="Description of Artificial Sequence: Synthetic oligonucleotide"
gtcagccacggaatgagcagc

SEQ ID NO: 41972 - DNA, 21 bp, Artificial Sequence
  source: /note="Description of Artificial Sequence: Synthetic oligonucleotide"
gtcagccacccaaacgcacca

SEQ ID NO: 41973 - DNA, 21 bp, Artificial Sequence
  source: /note="Description of Artificial Sequence: Synthetic oligonucleotide"
gtcagccacacaatgcaagaa

SEQ ID NO: 41974 - DNA, 21 bp, Artificial Sequence
  source: /note="Description of Artificial Sequence: Synthetic oligonucleotide"
gtcagcatcgcaggagcaagc

SEQ ID NO: 41975 - DNA, 21 bp, Artificial Sequence
  source: /note="Description of Artificial Sequence: Synthetic oligonucleotide"
gtcagcatcagcatcccaagc

SEQ ID NO: 41976 - DNA, 21 bp, Artificial Sequence
  source: /note="Description of Artificial Sequence: Synthetic oligonucleotide"
gtcagcatcagcatgccacca

SEQ ID NO: 41977 - DNA, 21 bp, Artificial Sequence
  source: /note="Description of Artificial Sequence: Synthetic oligonucleotide"
gtcagcaaagaaatgatcctc

SEQ ID NO: 41978 - DNA, 21 bp, Artificial Sequence
  source: /note="Description of Artificial Sequence: Synthetic oligonucleotide"
gtcagcaaaccaacaaacagc

SEQ ID NO: 41979 - DNA, 21 bp, Artificial Sequence
  source: /note="Description of Artificial Sequence: Synthetic oligonucleotide"
gtcagcaaaagcatcagcagc

SEQ ID NO: 41980 - DNA, 21 bp, Artificial Sequence
  source: /note="Description of Artificial Sequence: Synthetic oligonucleotide"
gtcagcctcggatacccagac

SEQ ID NO: 41981 - DNA, 21 bp, Artificial Sequence
  source: /note="Description of Artificial Sequence: Synthetic oligonucleotide"
gtcagcctcctcccaacaagc

SEQ ID NO: 41982 - DNA, 21 bp, Artificial Sequence
  source: /note="Description of Artificial Sequence: Synthetic oligonucleotide"
gtcagcctcctcacaagcaaa

SEQ ID NO: 41983 - DNA, 21 bp, Artificial Sequence
  source: /note="Description of Artificial Sequence: Synthetic oligonucleotide"
gtcagcctcccacaagaaaga

SEQ ID NO: 41984 - DNA, 21 bp, Artificial Sequence
  source: /note="Description of Artificial Sequence: Synthetic oligonucleotide"
gtcagcctccaaggaatcgac

SEQ ID NO: 41985 - DNA, 21 bp, Artificial Sequence
  source: /note="Description of Artificial Sequence: Synthetic oligonucleotide"
gtcagcctcagagcaccaaca

SEQ ID NO: 41986 - DNA, 21 bp, Artificial Sequence
  source: /note="Description of Artificial Sequence: Synthetic oligonucleotide"
gtcagcctcagacacacagca

SEQ ID NO: 41987 - DNA, 21 bp, Artificial Sequence
  source: /note="Description of Artificial Sequence: Synthetic oligonucleotide"
gtcagcctcagcccaatcagc

SEQ ID NO: 41988 - DNA, 21 bp, Artificial Sequence
  source: /note="Description of Artificial Sequence: Synthetic oligonucleotide"
gtcagcctcagcacaacagca

SEQ ID NO: 41989 - DNA, 21 bp, Artificial Sequence
  source: /note="Description of Artificial Sequence: Synthetic oligonucleotide"
gtcagcctcacactcagcagc

SEQ ID NO: 41990 - DNA, 21 bp, Artificial Sequence
  source: /note="Description of Artificial Sequence: Synthetic oligonucleotide"
gtcagcatgggaagaccactc

SEQ ID NO: 41991 - DNA, 21 bp, Artificial Sequence
  source: /note="Description of Artificial Sequence: Synthetic oligonucleotide"
gtcagcatgcacctcgaacca

SEQ ID NO: 41992 - DNA, 21 bp, Artificial Sequence
  source: /note="Description of Artificial Sequence: Synthetic oligonucleotide"
gtcagcatgaaaaacctccac

SEQ ID NO: 41993 - DNA, 21 bp, Artificial Sequence
  source: /note="Description of Artificial Sequence: Synthetic oligonucleotide"
gtcagcatgatggaaccagaa

SEQ ID NO: 41994 - DNA, 21 bp, Artificial Sequence
  source: /note="Description of Artificial Sequence: Synthetic oligonucleotide"
gtcagcatgccaagcagaagc

SEQ ID NO: 41995 - DNA, 21 bp, Artificial Sequence
  source: /note="Description of Artificial Sequence: Synthetic oligonucleotide"
gtcagcaacgcagcaagaatg

SEQ ID NO: 41996 - DNA, 21 bp, Artificial Sequence
  source: /note="Description of Artificial Sequence: Synthetic oligonucleotide"
gtcagcaacttccaaaaccca

SEQ ID NO: 41997 - DNA, 21 bp, Artificial Sequence
  source: /note="Description of Artificial Sequence: Synthetic oligonucleotide"
gtcagcaacatcagcagccca

SEQ ID NO: 41998 - DNA, 21 bp, Artificial Sequence
  source: /note="Description of Artificial Sequence: Synthetic oligonucleotide"
gtcagcaacatgcaattcgca

SEQ ID NO: 41999 - DNA, 21 bp, Artificial Sequence
  source: /note="Description of Artificial Sequence: Synthetic oligonucleotide"
gtcagcaacccagacctcatg

SEQ ID NO: 42000 - DNA, 21 bp, Artificial Sequence
  source: /note="Description of Artificial Sequence: Synthetic oligonucleotide"
gtcagcaacccacaagtcagc

SEQ ID NO: 42001 - DNA, 21 bp, Artificial Sequence
  source: /note="Description of Artificial Sequence: Synthetic oligonucleotide"
gtcagcaaccaagcaggatac

SEQ ID NO: 42002 - DNA, 21 bp, Artificial Sequence
  source: /note="Description of Artificial Sequence: Synthetic oligonucleotide"
gtcagcaaccaaaaacaagtc

SEQ ID NO: 42003 - DNA, 21 bp, Artificial Sequence
  source: /note="Description of Artificial Sequence: Synthetic oligonucleotide"
gtcagcaacagaagcacacaa

SEQ ID NO: 42004 - DNA, 21 bp, Artificial Sequence
  source: /note="Description of Artificial Sequence: Synthetic oligonucleotide"
gtcagcaacagcatggcacac

SEQ ID NO: 42005 - DNA, 21 bp, Artificial Sequence
  source: /note="Description of Artificial Sequence: Synthetic oligonucleotide"
gtcagcaacacactcctcgtc

SEQ ID NO: 42006 - DNA, 21 bp, Artificial Sequence
  source: /note="Description of Artificial Sequence: Synthetic oligonucleotide"
gtcagcccagcattccacaaa

SEQ ID NO: 42007 - DNA, 21 bp, Artificial Sequence
  source: /note="Description of Artificial Sequence: Synthetic oligonucleotide"
gtcagcccagcatggcacgga

SEQ ID NO: 42008 - DNA, 21 bp, Artificial Sequence
  source: /note="Description of Artificial Sequence: Synthetic oligonucleotide"
gtcagcccagaagaagacaga

SEQ ID NO: 42009 - DNA, 21 bp, Artificial Sequence
  source: /note="Description of Artificial Sequence: Synthetic oligonucleotide"
gtcagcccagaaccactcaga

SEQ ID NO: 42010 - DNA, 21 bp, Artificial Sequence
  source: /note="Description of Artificial Sequence: Synthetic oligonucleotide"
gtcagcccaggaaacccagca

SEQ ID NO: 42011 - DNA, 21 bp, Artificial Sequence
  source: /note="Description of Artificial Sequence: Synthetic oligonucleotide"
gtcagcccacacccagtccac

SEQ ID NO: 42012 - DNA, 21 bp, Artificial Sequence
  source: /note="Description of Artificial Sequence: Synthetic oligonucleotide"
gtcagcccactcctcccaagc

SEQ ID NO: 42013 - DNA, 21 bp, Artificial Sequence
  source: /note="Description of Artificial Sequence: Synthetic oligonucleotide"
gtcagcccactcaacacaagc

SEQ ID NO: 42014 - DNA, 21 bp, Artificial Sequence
  source: /note="Description of Artificial Sequence: Synthetic oligonucleotide"
gtcagcccaatgacagaaatc

SEQ ID NO: 42015 - DNA, 21 bp, Artificial Sequence
  source: /note="Description of Artificial Sequence: Synthetic oligonucleotide"
gtcagcccaagaccaggacaa

SEQ ID NO: 42016 - DNA, 21 bp, Artificial Sequence
  source: /note="Description of Artificial Sequence: Synthetic oligonucleotide"
gtcagcccaagcaacagagga

SEQ ID NO: 42017 - DNA, 21 bp, Artificial Sequence
  source: /note="Description of Artificial Sequence: Synthetic oligonucleotide"
gtcagcccaagcagcgcactc

SEQ ID NO: 42018 - DNA, 21 bp, Artificial Sequence
  source: /note="Description of Artificial Sequence: Synthetic oligonucleotide"
gtcagcccaacacaacacttc

SEQ ID NO: 42019 - DNA, 21 bp, Artificial Sequence
  source: /note="Description of Artificial Sequence: Synthetic oligonucleotide"
gtcagcccaacatacagcctc

SEQ ID NO: 42020 - DNA, 21 bp, Artificial Sequence
  source: /note="Description of Artificial Sequence: Synthetic oligonucleotide"
gtcagcccagtctacacaagc

SEQ ID NO: 42021 - DNA, 21 bp, Artificial Sequence
  source: /note="Description of Artificial Sequence: Synthetic oligonucleotide"
gtcagcccatacccaagagac

SEQ ID NO: 42022 - DNA, 21 bp, Artificial Sequence
  source: /note="Description of Artificial Sequence: Synthetic oligonucleotide"
gtcagccaactcggaagccca

SEQ ID NO: 42023 - DNA, 21 bp, Artificial Sequence
  source: /note="Description of Artificial Sequence: Synthetic oligonucleotide"
gtcagccaactcacacaagtc

SEQ ID NO: 42024 - DNA, 21 bp, Artificial Sequence
  source: /note="Description of Artificial Sequence: Synthetic oligonucleotide"
gtcagccaaccaagctacgga

SEQ ID NO: 42025 - DNA, 21 bp, Artificial Sequence
  source: /note="Description of Artificial Sequence: Synthetic oligonucleotide"
gtcagccaaagctacacaaac

SEQ ID NO: 42026 - DNA, 21 bp, Artificial Sequence
  source: /note="Description of Artificial Sequence: Synthetic oligonucleotide"
gtcagccaagtcaaacaagga

SEQ ID NO: 42027 - DNA, 21 bp, Artificial Sequence
  source: /note="Description of Artificial Sequence: Synthetic oligonucleotide"
gtcagcagagcaacaccaaac

SEQ ID NO: 42028 - DNA, 21 bp, Artificial Sequence
  source: /note="Description of Artificial Sequence: Synthetic oligonucleotide"
gtcagcagagaaatcaacagc

SEQ ID NO: 42029 - DNA, 21 bp, Artificial Sequence
  source: /note="Description of Artificial Sequence: Synthetic oligonucleotide"
gtcagcagacaagacagcctc

SEQ ID NO: 42030 - DNA, 21 bp, Artificial Sequence
  source: /note="Description of Artificial Sequence: Synthetic oligonucleotide"
gtcagcagaagcggaaacagc

SEQ ID NO: 42031 - DNA, 21 bp, Artificial Sequence
  source: /note="Description of Artificial Sequence: Synthetic oligonucleotide"
gtcagcagaacaatggacaca

SEQ ID NO: 42032 - DNA, 21 bp, Artificial Sequence
  source: /note="Description of Artificial Sequence: Synthetic oligonucleotide"
gtcagcagagtcgaactcgca

SEQ ID NO: 42033 - DNA, 21 bp, Artificial Sequence
  source: /note="Description of Artificial Sequence: Synthetic oligonucleotide"
gtcagcagcgcacacagcatc

SEQ ID NO: 42034 - DNA, 21 bp, Artificial Sequence
  source: /note="Description of Artificial Sequence: Synthetic oligonucleotide"
gtcagcagcgcacacacaagc

SEQ ID NO: 42035 - DNA, 21 bp, Artificial Sequence
  source: /note="Description of Artificial Sequence: Synthetic oligonucleotide"
gtcagcagcgcaatcagctac

SEQ ID NO: 42036 - DNA, 21 bp, Artificial Sequence
  source: /note="Description of Artificial Sequence: Synthetic oligonucleotide"
gtcagcagcgcaagaggaaca

SEQ ID NO: 42037 - DNA, 21 bp, Artificial Sequence
  source: /note="Description of Artificial Sequence: Synthetic oligonucleotide"
gtcagcagcgcaagcccaatg

SEQ ID NO: 42038 - DNA, 21 bp, Artificial Sequence
  source: /note="Description of Artificial Sequence: Synthetic oligonucleotide"
gtcagcagcgacagactcctc

SEQ ID NO: 42039 - DNA, 21 bp, Artificial Sequence
  source: /note="Description of Artificial Sequence: Synthetic oligonucleotide"
gtcagcagcgactacagcaac

SEQ ID NO: 42040 - DNA, 21 bp, Artificial Sequence
  source: /note="Description of Artificial Sequence: Synthetic oligonucleotide"
gtcagcagcttcctcgaagac

SEQ ID NO: 42041 - DNA, 21 bp, Artificial Sequence
  source: /note="Description of Artificial Sequence: Synthetic oligonucleotide"
gtcagcagcctcgaactcgca

SEQ ID NO: 42042 - DNA, 21 bp, Artificial Sequence
  source: /note="Description of Artificial Sequence: Synthetic oligonucleotide"
gtcagcagcctcaaaacatac

SEQ ID NO: 42043 - DNA, 21 bp, Artificial Sequence
  source: /note="Description of Artificial Sequence: Synthetic oligonucleotide"
gtcagcagcctcagaggacca

SEQ ID NO: 42044 - DNA, 21 bp, Artificial Sequence
  source: /note="Description of Artificial Sequence: Synthetic oligonucleotide"
gtcagcagcctcagcagcctc

SEQ ID NO: 42045 - DNA, 21 bp, Artificial Sequence
  source: /note="Description of Artificial Sequence: Synthetic oligonucleotide"
gtcagcagcatgctcgacgca

SEQ ID NO: 42046 - DNA, 21 bp, Artificial Sequence
  source: /note="Description of Artificial Sequence: Synthetic oligonucleotide"
gtcagcagcatgaacatcgtc

SEQ ID NO: 42047 - DNA, 21 bp, Artificial Sequence
  source: /note="Description of Artificial Sequence: Synthetic oligonucleotide"
gtcagcagcatgccagtccca

SEQ ID NO: 42048 - DNA, 21 bp, Artificial Sequence
  source: /note="Description of Artificial Sequence: Synthetic oligonucleotide"
gtcagcagcaacagcttcgca

SEQ ID NO: 42049 - DNA, 21 bp, Artificial Sequence
  source: /note="Description of Artificial Sequence: Synthetic oligonucleotide"
gtcagcagcccagacagcaac

SEQ ID NO: 42050 - DNA, 21 bp, Artificial Sequence
  source: /note="Description of Artificial Sequence: Synthetic oligonucleotide"
gtcagcagcccactcagcgga

SEQ ID NO: 42051 - DNA, 21 bp, Artificial Sequence
  source: /note="Description of Artificial Sequence: Synthetic oligonucleotide"
gtcagcagcccaccagacctc

SEQ ID NO: 42052 - DNA, 21 bp, Artificial Sequence
  source: /note="Description of Artificial Sequence: Synthetic oligonucleotide"
gtcagcagcccaagagaacac

SEQ ID NO: 42053 - DNA, 21 bp, Artificial Sequence
  source: /note="Description of Artificial Sequence: Synthetic oligonucleotide"
gtcagcagccaaaacgtcttc

SEQ ID NO: 42054 - DNA, 21 bp, Artificial Sequence
  source: /note="Description of Artificial Sequence: Synthetic oligonucleotide"
gtcagcagccaaagaaacgga

SEQ ID NO: 42055 - DNA, 21 bp, Artificial Sequence
  source: /note="Description of Artificial Sequence: Synthetic oligonucleotide"
gtcagcagcagataccacgca

SEQ ID NO: 42056 - DNA, 21 bp, Artificial Sequence
  source: /note="Description of Artificial Sequence: Synthetic oligonucleotide"
gtcagcagcagcggaatgaca

SEQ ID NO: 42057 - DNA, 21 bp, Artificial Sequence
  source: /note="Description of Artificial Sequence: Synthetic oligonucleotide"
gtcagcagcagcctcatgagc

SEQ ID NO: 42058 - DNA, 21 bp, Artificial Sequence
  source: /note="Description of Artificial Sequence: Synthetic oligonucleotide"
gtcagcagcagccaaatgcca

SEQ ID NO: 42059 - DNA, 21 bp, Artificial Sequence
  source: /note="Description of Artificial Sequence: Synthetic oligonucleotide"
gtcagcagcagcgtcctcaga

SEQ ID NO: 42060 - DNA, 21 bp, Artificial Sequence
  source: /note="Description of Artificial Sequence: Synthetic oligonucleotide"
gtcagcagcacaatcgtcatg

SEQ ID NO: 42061 - DNA, 21 bp, Artificial Sequence
  source: /note="Description of Artificial Sequence: Synthetic oligonucleotide"
gtcagcagcgtcgtcagcgga

SEQ ID NO: 42062 - DNA, 21 bp, Artificial Sequence
  source: /note="Description of Artificial Sequence: Synthetic oligonucleotide"
gtcagcacagcacaccaaagc

SEQ ID NO: 42063 - DNA, 21 bp, Artificial Sequence
  source: /note="Description of Artificial Sequence: Synthetic oligonucleotide"
gtcagcacattcggaccaaca

SEQ ID NO: 42064 - DNA, 21 bp, Artificial Sequence
  source: /note="Description of Artificial Sequence: Synthetic oligonucleotide"
gtcagcacaggactcacaaaa

SEQ ID NO: 42065 - DNA, 21 bp, Artificial Sequence
  source: /note="Description of Artificial Sequence: Synthetic oligonucleotide"
gtcagcacaggatacgcagtc

SEQ ID NO: 42066 - DNA, 21 bp, Artificial Sequence
  source: /note="Description of Artificial Sequence: Synthetic oligonucleotide"
gtcagcacaatcgcattcgaa

SEQ ID NO: 42067 - DNA, 21 bp, Artificial Sequence
  source: /note="Description of Artificial Sequence: Synthetic oligonucleotide"
gtcagcacaatcagcagcctc

SEQ ID NO: 42068 - DNA, 21 bp, Artificial Sequence
  source: /note="Description of Artificial Sequence: Synthetic oligonucleotide"
gtcagcacactccaagcagga

SEQ ID NO: 42069 - DNA, 21 bp, Artificial Sequence
  source: /note="Description of Artificial Sequence: Synthetic oligonucleotide"
gtcagcacaatgagaagccca

SEQ ID NO: 42070 - DNA, 21 bp, Artificial Sequence
  source: /note="Description of Artificial Sequence: Synthetic oligonucleotide"
gtcagcacaccaaacaacaaa

SEQ ID NO: 42071 - DNA, 21 bp, Artificial Sequence
  source: /note="Description of Artificial Sequence: Synthetic oligonucleotide"
gtcagcacacaaacatacaaa

SEQ ID NO: 42072 - DNA, 21 bp, Artificial Sequence
  source: /note="Description of Artificial Sequence: Synthetic oligonucleotide"
gtcagcacaagacaactcctc

SEQ ID NO: 42073 - DNA, 21 bp, Artificial Sequence
  source: /note="Description of Artificial Sequence: Synthetic oligonucleotide"
gtcagcacaagcgtcctcaga

SEQ ID NO: 42074 - DNA, 21 bp, Artificial Sequence
  source: /note="Description of Artificial Sequence: Synthetic oligonucleotide"
gtcagcacaacattcaaagtc

SEQ ID NO: 42075 - DNA, 21 bp, Artificial Sequence
  source: /note="Description of Artificial Sequence: Synthetic oligonucleotide"
gtcagcgtcaaagtccacgac

SEQ ID NO: 42076 - DNA, 21 bp, Artificial Sequence
  source: /note="Description of Artificial Sequence: Synthetic oligonucleotide"
gtcagcgtccaaagcagcaga

SEQ ID NO: 42077 - DNA, 21 bp, Artificial Sequence
  source: /note="Description of Artificial Sequence: Synthetic oligonucleotide"
gtcagcgtcagcacacaccac

SEQ ID NO: 42078 - DNA, 21 bp, Artificial Sequence
  source: /note="Description of Artificial Sequence: Synthetic oligonucleotide"
gtcagcgtcagcgtcggagaa

SEQ ID NO: 42079 - DNA, 21 bp, Artificial Sequence
  source: /note="Description of Artificial Sequence: Synthetic oligonucleotide"
gtcagcgtcacagcaggagga

SEQ ID NO: 42080 - DNA, 21 bp, Artificial Sequence
  source: /note="Description of Artificial Sequence: Synthetic oligonucleotide"
gtcagcgtcacaagcgcagga

SEQ ID NO: 42081 - DNA, 21 bp, Artificial Sequence
  source: /note="Description of Artificial Sequence: Synthetic oligonucleotide"
gtcagctacgcaatggaaaac

SEQ ID NO: 42082 - DNA, 21 bp, Artificial Sequence
  source: /note="Description of Artificial Sequence: Synthetic oligonucleotide"
gtcagctacccagcacaagca

SEQ ID NO: 42083 - DNA, 21 bp, Artificial Sequence
  source: /note="Description of Artificial Sequence: Synthetic oligonucleotide"
gtcacagcaggaccaatgaga

SEQ ID NO: 42084 - DNA, 21 bp, Artificial Sequence
  source: /note="Description of Artificial Sequence: Synthetic oligonucleotide"
gtcacagcactcacaatcgca

SEQ ID NO: 42085 - DNA, 21 bp, Artificial Sequence
  source: /note="Description of Artificial Sequence: Synthetic oligonucleotide"
gtcacagcactcgtcaaagac

SEQ ID NO: 42086 - DNA, 21 bp, Artificial Sequence
  source: /note="Description of Artificial Sequence: Synthetic oligonucleotide"
gtcacagcaaacctcccacaa

SEQ ID NO: 42087 - DNA, 21 bp, Artificial Sequence
  source: /note="Description of Artificial Sequence: Synthetic oligonucleotide"
gtcacagcaaacgtcctccca

SEQ ID NO: 42088 - DNA, 21 bp, Artificial Sequence
  source: /note="Description of Artificial Sequence: Synthetic oligonucleotide"
gtcacagcaccagtcacagga

SEQ ID NO: 42089 - DNA, 21 bp, Artificial Sequence
  source: /note="Description of Artificial Sequence: Synthetic oligonucleotide"
gtcacagcacaaagcagcgtc

SEQ ID NO: 42090 - DNA, 21 bp, Artificial Sequence
  source: /note="Description of Artificial Sequence: Synthetic oligonucleotide"
gtcacagcaagaagcctcgca

SEQ ID NO: 42091 - DNA, 21 bp, Artificial Sequence
  source: /note="Description of Artificial Sequence: Synthetic oligonucleotide"
gtcacagcaagccacagagtc

SEQ ID NO: 42092 - DNA, 21 bp, Artificial Sequence
  source: /note="Description of Artificial Sequence: Synthetic oligonucleotide"
gtcacagacgcagtcacaaca

SEQ ID NO: 42093 - DNA, 21 bp, Artificial Sequence
  source: /note="Description of Artificial Sequence: Synthetic oligonucleotide"
gtcacagacaacgtcagaaac

SEQ ID NO: 42094 - DNA, 21 bp, Artificial Sequence
  source: /note="Description of Artificial Sequence: Synthetic oligonucleotide"
gtcacagacagcacagacgac

SEQ ID NO: 42095 - DNA, 21 bp, Artificial Sequence
  source: /note="Description of Artificial Sequence: Synthetic oligonucleotide"
gtcacagacacaagagaaaga

SEQ ID NO: 42096 - DNA, 21 bp, Artificial Sequence
  source: /note="Description of Artificial Sequence: Synthetic oligonucleotide"
gtcacagaagcaagaagcgca

SEQ ID NO: 42097 - DNA, 21 bp, Artificial Sequence
  source: /note="Description of Artificial Sequence: Synthetic oligonucleotide"
gtcacagaagaaagcgacatg

SEQ ID NO: 42098 - DNA, 21 bp, Artificial Sequence
  source: /note="Description of Artificial Sequence: Synthetic oligonucleotide"
gtcacagaagaaagcaacaca

SEQ ID NO: 42099 - DNA, 21 bp, Artificial Sequence
  source: /note="Description of Artificial Sequence: Synthetic oligonucleotide"
gtcacagaacacctcaaaaac

SEQ ID NO: 42100 - DNA, 21 bp, Artificial Sequence
  source: /note="Description of Artificial Sequence: Synthetic oligonucleotide"
gtcacagaaagaatgacactc

SEQ ID NO: 42101 - DNA, 21 bp, Artificial Sequence
  source: /note="Description of Artificial Sequence: Synthetic oligonucleotide"
gtcacattcagcagcagcgga

SEQ ID NO: 42102 - DNA, 21 bp, Artificial Sequence
  source: /note="Description of Artificial Sequence: Synthetic oligonucleotide"
gtcacaggagcaagactcgca

SEQ ID NO: 42103 - DNA, 21 bp, Artificial Sequence
  source: /note="Description of Artificial Sequence: Synthetic oligonucleotide"
gtcacaggacacgcaatcctc

SEQ ID NO: 42104 - DNA, 21 bp, Artificial Sequence
  source: /note="Description of Artificial Sequence: Synthetic oligonucleotide"
gtcacaggaaaaccaagcctc

SEQ ID NO: 42105 - DNA, 21 bp, Artificial Sequence
  source: /note="Description of Artificial Sequence: Synthetic oligonucleotide"
gtcacaggaccaggactcaga

SEQ ID NO: 42106 - DNA, 21 bp, Artificial Sequence
  source: /note="Description of Artificial Sequence: Synthetic oligonucleotide"
gtcacaggaacaagaacagtc

SEQ ID NO: 42107 - DNA, 21 bp, Artificial Sequence
  source: /note="Description of Artificial Sequence: Synthetic oligonucleotide"
gtcacacacctcatgcaagga

SEQ ID NO: 42108 - DNA, 21 bp, Artificial Sequence
  source: /note="Description of Artificial Sequence: Synthetic oligonucleotide"
gtcacacacccaaacctcagc

SEQ ID NO: 42109 - DNA, 21 bp, Artificial Sequence
  source: /note="Description of Artificial Sequence: Synthetic oligonucleotide"
gtcacacacacagaattccca

SEQ ID NO: 42110 - DNA, 21 bp, Artificial Sequence
  source: /note="Description of Artificial Sequence: Synthetic oligonucleotide"
gtcacacacacaggacacaaa

SEQ ID NO: 42111 - DNA, 21 bp, Artificial Sequence
  source: /note="Description of Artificial Sequence: Synthetic oligonucleotide"
gtcacacactacagcagcgtc

SEQ ID NO: 42112 - DNA, 21 bp, Artificial Sequence
  source: /note="Description of Artificial Sequence: Synthetic oligonucleotide"
gtcacaatcgacgactaccca

SEQ ID NO: 42113 - DNA, 21 bp, Artificial Sequence
  source: /note="Description of Artificial Sequence: Synthetic oligonucleotide"
gtcacaaaagcaagcgcacca

SEQ ID NO: 42114 - DNA, 21 bp, Artificial Sequence
  source: /note="Description of Artificial Sequence: Synthetic oligonucleotide"
gtcacactcaaaccactcagc

SEQ ID NO: 42115 - DNA, 21 bp, Artificial Sequence
  source: /note="Description of Artificial Sequence: Synthetic oligonucleotide"
gtcacactcctcgcaagcaga

SEQ ID NO: 42116 - DNA, 21 bp, Artificial Sequence
  source: /note="Description of Artificial Sequence: Synthetic oligonucleotide"
gtcacactcccactcacaaga

SEQ ID NO: 42117 - DNA, 21 bp, Artificial Sequence
  source: /note="Description of Artificial Sequence: Synthetic oligonucleotide"
gtcacactccaaagaccagga

SEQ ID NO: 42118 - DNA, 21 bp, Artificial Sequence
  source: /note="Description of Artificial Sequence: Synthetic oligonucleotide"
gtcacactcagcgcagaagga

SEQ ID NO: 42119 - DNA, 21 bp, Artificial Sequence
  source: /note="Description of Artificial Sequence: Synthetic oligonucleotide"
gtcacactcagcgacagactc

SEQ ID NO: 42120 - DNA, 21 bp, Artificial Sequence
  source: /note="Description of Artificial Sequence: Synthetic oligonucleotide"
gtcacaatgagcacaatcaga

SEQ ID NO: 42121 - DNA, 21 bp, Artificial Sequence
  source: /note="Description of Artificial Sequence: Synthetic oligonucleotide"
gtcacaaacagagtccaccca

SEQ ID NO: 42122 - DNA, 21 bp, Artificial Sequence
  source: /note="Description of Artificial Sequence: Synthetic oligonucleotide"
gtcacaccagacctcagacac

SEQ ID NO: 42123 - DNA, 21 bp, Artificial Sequence
  source: /note="Description of Artificial Sequence: Synthetic oligonucleotide"
gtcacaccagacagcctcaaa

SEQ ID NO: 42124 - DNA, 21 bp, Artificial Sequence
  source: /note="Description of Artificial Sequence: Synthetic oligonucleotide"
gtcacaccagactacagaaac

SEQ ID NO: 42125 - DNA, 21 bp, Artificial Sequence
  source: /note="Description of Artificial Sequence: Synthetic oligonucleotide"
gtcacaccaggactcgcatac

SEQ ID NO: 42126 - DNA, 21 bp, Artificial Sequence
  source: /note="Description of Artificial Sequence: Synthetic oligonucleotide"
gtcacaccactcctcacagca

SEQ ID NO: 42127 - DNA, 21 bp, Artificial Sequence
  source: /note="Description of Artificial Sequence: Synthetic oligonucleotide"
gtcacaccacaaacaaacttc

SEQ ID NO: 42128 - DNA, 21 bp, Artificial Sequence
  source: /note="Description of Artificial Sequence: Synthetic oligonucleotide"
gtcacaccagtcggaaaaaca

SEQ ID NO: 42129 - DNA, 21 bp, Artificial Sequence
  source: /note="Description of Artificial Sequence: Synthetic oligonucleotide"
gtcacacaacacacaagcaca

SEQ ID NO: 42130 - DNA, 21 bp, Artificial Sequence
  source: /note="Description of Artificial Sequence: Synthetic oligonucleotide"
gtcacacaaatcctcagaaca

SEQ ID NO: 42131 - DNA, 21 bp, Artificial Sequence
  source: /note="Description of Artificial Sequence: Synthetic oligonucleotide"
gtcacacaaccacacgcaagc

SEQ ID NO: 42132 - DNA, 21 bp, Artificial Sequence
  source: /note="Description of Artificial Sequence: Synthetic oligonucleotide"
gtcacaagagcactccacgac

SEQ ID NO: 42133 - DNA, 21 bp, Artificial Sequence
  source: /note="Description of Artificial Sequence: Synthetic oligonucleotide"
gtcacaagaatggaaagcgca

SEQ ID NO: 42134 - DNA, 21 bp, Artificial Sequence
  source: /note="Description of Artificial Sequence: Synthetic oligonucleotide"
gtcacaagcgcactcgtcaga

SEQ ID NO: 42135 - DNA, 21 bp, Artificial Sequence
  source: /note="Description of Artificial Sequence: Synthetic oligonucleotide"
gtcacaagcgcaatgcaagga

SEQ ID NO: 42136 - DNA, 21 bp, Artificial Sequence
  source: /note="Description of Artificial Sequence: Synthetic oligonucleotide"
gtcacaagcgcaagcacacac

SEQ ID NO: 42137 - DNA, 21 bp, Artificial Sequence
  source: /note="Description of Artificial Sequence: Synthetic oligonucleotide"
gtcacaagcttcgtcgcacca

SEQ ID NO: 42138 - DNA, 21 bp, Artificial Sequence
  source: /note="Description of Artificial Sequence: Synthetic oligonucleotide"
gtcacaagccacacaggagaa

SEQ ID NO: 42139 - DNA, 21 bp, Artificial Sequence
  source: /note="Description of Artificial Sequence: Synthetic oligonucleotide"
gtcacaagcccaacattcgaa

SEQ ID NO: 42140 - DNA, 21 bp, Artificial Sequence
  source: /note="Description of Artificial Sequence: Synthetic oligonucleotide"
gtcacaagcagaagcgcagtc

SEQ ID NO: 42141 - DNA, 21 bp, Artificial Sequence
  source: /note="Description of Artificial Sequence: Synthetic oligonucleotide"
gtcacaagcagcacacaactc

SEQ ID NO: 42142 - DNA, 21 bp, Artificial Sequence
  source: /note="Description of Artificial Sequence: Synthetic oligonucleotide"
gtcacaagcacaagcacaaac

SEQ ID NO: 42143 - DNA, 21 bp, Artificial Sequence
  source: /note="Description of Artificial Sequence: Synthetic oligonucleotide"
gtcacaagcgtcagcccaatc

SEQ ID NO: 42144 - DNA, 21 bp, Artificial Sequence
  source: /note="Description of Artificial Sequence: Synthetic oligonucleotide"
gtcacaacagcaacaggaatc

SEQ ID NO: 42145 - DNA, 21 bp, Artificial Sequence
  source: /note="Description of Artificial Sequence: Synthetic oligonucleotide"
gtcacaacagaaccaagattc

SEQ ID NO: 42146 - DNA, 21 bp, Artificial Sequence
  source: /note="Description of Artificial Sequence: Synthetic oligonucleotide"
gtcacaacaatcagagcacac

SEQ ID NO: 42147 - DNA, 21 bp, Artificial Sequence
  source: /note="Description of Artificial Sequence: Synthetic oligonucleotide"
gtcacaacaaaacaaacatgc

SEQ ID NO: 42148 - DNA, 21 bp, Artificial Sequence
  source: /note="Description of Artificial Sequence: Synthetic oligonucleotide"
gtcacaacaaacggaccaatc

SEQ ID NO: 42149 - DNA, 21 bp, Artificial Sequence
  source: /note="Description of Artificial Sequence: Synthetic oligonucleotide"
gtcacaacacaattcgaaagc

SEQ ID NO: 42150 - DNA, 21 bp, Artificial Sequence
  source: /note="Description of Artificial Sequence: Synthetic oligonucleotide"
gtcacaacaagaccataccca

SEQ ID NO: 42151 - DNA, 21 bp, Artificial Sequence
  source: /note="Description of Artificial Sequence: Synthetic oligonucleotide"
gtcacaacaagcagatacctc

SEQ ID NO: 42152 - DNA, 21 bp, Artificial Sequence
  source: /note="Description of Artificial Sequence: Synthetic oligonucleotide"
gtcacaacaagcacaagcaga

SEQ ID NO: 42153 - DNA, 21 bp, Artificial Sequence
  source: /note="Description of Artificial Sequence: Synthetic oligonucleotide"
gtcacaacaacacaaatcaca

SEQ ID NO: 42154 - DNA, 21 bp, Artificial Sequence
  source: /note="Description of Artificial Sequence: Synthetic oligonucleotide"
gtcacaacagtcatcctcgac

SEQ ID NO: 42155 - DNA, 21 bp, Artificial Sequence
  source: /note="Description of Artificial Sequence: Synthetic oligonucleotide"
gtcacagtccacagccacttc

SEQ ID NO: 42156 - DNA, 21 bp, Artificial Sequence
  source: /note="Description of Artificial Sequence: Synthetic oligonucleotide"
gtcacagtcccactcccaagc

SEQ ID NO: 42157 - DNA, 21 bp, Artificial Sequence
  source: /note="Description of Artificial Sequence: Synthetic oligonucleotide"
gtcacagtccaaatgaacgtc

SEQ ID NO: 42158 - DNA, 21 bp, Artificial Sequence
  source: /note="Description of Artificial Sequence: Synthetic oligonucleotide"
gtcacagtcagaggaagcatc

SEQ ID NO: 42159 - DNA, 21 bp, Artificial Sequence
  source: /note="Description of Artificial Sequence: Synthetic oligonucleotide"
gtcacagtcacaggaacaatc

SEQ ID NO: 42160 - DNA, 21 bp, Artificial Sequence
  source: /note="Description of Artificial Sequence: Synthetic oligonucleotide"
gtcacatacagcccactcgga

SEQ ID NO: 42161 - DNA, 21 bp, Artificial Sequence
  source: /note="Description of Artificial Sequence: Synthetic oligonucleotide"
gtcgtcgcaggaagaagcagc

SEQ ID NO: 42162 - DNA, 21 bp, Artificial Sequence
  source: /note="Description of Artificial Sequence: Synthetic oligonucleotide"
gtcgtcgcacaaccaggacac

SEQ ID NO: 42163 - DNA, 21 bp, Artificial Sequence
  source: /note="Description of Artificial Sequence: Synthetic oligonucleotide"
gtcgtcgcaacaacactcaac

SEQ ID NO: 42164 - DNA, 21 bp, Artificial Sequence
  source: /note="Description of Artificial Sequence: Synthetic oligonucleotide"
gtcgtcgacagcccaagagca

SEQ ID NO: 42165 - DNA, 21 bp, Artificial Sequence
  source: /note="Description of Artificial Sequence: Synthetic oligonucleotide"
gtcgtcgacgtcccactcaga

SEQ ID NO: 42166 - DNA, 21 bp, Artificial Sequence
  source: /note="Description of Artificial Sequence: Synthetic oligonucleotide"
gtcgtcgaaacattcgaacca

SEQ ID NO: 42167 - DNA, 21 bp, Artificial Sequence
  source: /note="Description of Artificial Sequence: Synthetic oligonucleotide"
gtcgtcggagacggaacaatc

SEQ ID NO: 42168 - DNA, 21 bp, Artificial Sequence
  source: /note="Description of Artificial Sequence: Synthetic oligonucleotide"
gtcgtcggagaccaagcagac

SEQ ID NO: 42169 - DNA, 21 bp, Artificial Sequence
  source: /note="Description of Artificial Sequence: Synthetic oligonucleotide"
gtcgtcggaggacaactcctc

SEQ ID NO: 42170 - DNA, 21 bp, Artificial Sequence
  source: /note="Description of Artificial Sequence: Synthetic oligonucleotide"
gtcgtcggaatcagaggagaa

SEQ ID NO: 42171 - DNA, 21 bp, Artificial Sequence
  source: /note="Description of Artificial Sequence: Synthetic oligonucleotide"
gtcgtcggaatgggaacagga

SEQ ID NO: 42172 - DNA, 21 bp, Artificial Sequence
  source: /note="Description of Artificial Sequence: Synthetic oligonucleotide"
gtcgtcggaccaagcctccca

SEQ ID NO: 42173 - DNA, 21 bp, Artificial Sequence
  source: /note="Description of Artificial Sequence: Synthetic oligonucleotide"
gtcgtcggaagacaagaaaga

SEQ ID NO: 42174 - DNA, 21 bp, Artificial Sequence
  source: /note="Description of Artificial Sequence: Synthetic oligonucleotide"
gtcgtcggaagaagcaaccca

SEQ ID NO: 42175 - DNA, 21 bp, Artificial Sequence
  source: /note="Description of Artificial Sequence: Synthetic oligonucleotide"
gtcgtcggaagcccaacaaga

SEQ ID NO: 42176 - DNA, 21 bp, Artificial Sequence
  source: /note="Description of Artificial Sequence: Synthetic oligonucleotide"
gtcgtcggaagcagcggacca

SEQ ID NO: 42177 - DNA, 21 bp, Artificial Sequence
  source: /note="Description of Artificial Sequence: Synthetic oligonucleotide"
gtcgtccacccaccaggacaa

SEQ ID NO: 42178 - DNA, 21 bp, Artificial Sequence
  source: /note="Description of Artificial Sequence: Synthetic oligonucleotide"
gtcgtccacccaagcccagga

SEQ ID NO: 42179 - DNA, 21 bp, Artificial Sequence
  source: /note="Description of Artificial Sequence: Synthetic oligonucleotide"
gtcgtccacagcaacgaacca

SEQ ID NO: 42180 - DNA, 21 bp, Artificial Sequence
  source: /note="Description of Artificial Sequence: Synthetic oligonucleotide"
gtcgtccacacaatgagcgtc

SEQ ID NO: 42181 - DNA, 21 bp, Artificial Sequence
  source: /note="Description of Artificial Sequence: Synthetic oligonucleotide"
gtcgtccacgtcagccaccca

SEQ ID NO: 42182 - DNA, 21 bp, Artificial Sequence
  source: /note="Description of Artificial Sequence: Synthetic oligonucleotide"
gtcgtccacgtcgtcaacagc

SEQ ID NO: 42183 - DNA, 21 bp, Artificial Sequence
  source: /note="Description of Artificial Sequence: Synthetic oligonucleotide"
gtcgtcatcgaccaaaacgga

SEQ ID NO: 42184 - DNA, 21 bp, Artificial Sequence
  source: /note="Description of Artificial Sequence: Synthetic oligonucleotide"
gtcgtcctcaaagacaaccac

SEQ ID NO: 42185 - DNA, 21 bp, Artificial Sequence
  source: /note="Description of Artificial Sequence: Synthetic oligonucleotide"
gtcgtcatgagagacgaccca

SEQ ID NO: 42186 - DNA, 21 bp, Artificial Sequence
  source: /note="Description of Artificial Sequence: Synthetic oligonucleotide"
gtcgtcaacgcaagcgcaaac

SEQ ID NO: 42187 - DNA, 21 bp, Artificial Sequence
  source: /note="Description of Artificial Sequence: Synthetic oligonucleotide"
gtcgtcaacaacctcagaatc

SEQ ID NO: 42188 - DNA, 21 bp, Artificial Sequence
  source: /note="Description of Artificial Sequence: Synthetic oligonucleotide"
gtcgtcaaccaagcacaactc

SEQ ID NO: 42189 - DNA, 21 bp, Artificial Sequence
  source: /note="Description of Artificial Sequence: Synthetic oligonucleotide"
gtcgtcaacacaaaagcaaac

SEQ ID NO: 42190 - DNA, 21 bp, Artificial Sequence
  source: /note="Description of Artificial Sequence: Synthetic oligonucleotide"
gtcgtcaacacaaaaagcgga

SEQ ID NO: 42191 - DNA, 21 bp, Artificial Sequence
  source: /note="Description of Artificial Sequence: Synthetic oligonucleotide"
gtcgtcccagcactcaaaatg

SEQ ID NO: 42192 - DNA, 21 bp, Artificial Sequence
  source: /note="Description of Artificial Sequence: Synthetic oligonucleotide"
gtcgtcccacacagcagacaa

SEQ ID NO: 42193 - DNA, 21 bp, Artificial Sequence
  source: /note="Description of Artificial Sequence: Synthetic oligonucleotide"
gtcgtcccactcggaccagtc

SEQ ID NO: 42194 - DNA, 21 bp, Artificial Sequence
  source: /note="Description of Artificial Sequence: Synthetic oligonucleotide"
gtcgtcccaagagacccagga

SEQ ID NO: 42195 - DNA, 21 bp, Artificial Sequence
  source: /note="Description of Artificial Sequence: Synthetic oligonucleotide"
gtcgtcccaagaatgacagga

SEQ ID NO: 42196 - DNA, 21 bp, Artificial Sequence
  source: /note="Description of Artificial Sequence: Synthetic oligonucleotide"
gtcgtcccaagaccaggaatg

SEQ ID NO: 42197 - DNA, 21 bp, Artificial Sequence
  source: /note="Description of Artificial Sequence: Synthetic oligonucleotide"
gtcgtcccaagaagcggagac

SEQ ID NO: 42198 - DNA, 21 bp, Artificial Sequence
  source: /note="Description of Artificial Sequence: Synthetic oligonucleotide"
gtcgtcccaacagacgacgga

SEQ ID NO: 42199 - DNA, 21 bp, Artificial Sequence
  source: /note="Description of Artificial Sequence: Synthetic oligonucleotide"
gtcgtccaaccaagagcagga

SEQ ID NO: 42200 - DNA, 21 bp, Artificial Sequence
  source: /note="Description of Artificial Sequence: Synthetic oligonucleotide"
gtcgtccaacaaagcagcctc

SEQ ID NO: 42201 - DNA, 21 bp, Artificial Sequence
  source: /note="Description of Artificial Sequence: Synthetic oligonucleotide"
gtcgtcagagcaagcagcgtc

SEQ ID NO: 42202 - DNA, 21 bp, Artificial Sequence
  source: /note="Description of Artificial Sequence: Synthetic oligonucleotide"
gtcgtcagaggaagcagcgtc

SEQ ID NO: 42203 - DNA, 21 bp, Artificial Sequence
  source: /note="Description of Artificial Sequence: Synthetic oligonucleotide"
gtcgtcagaaacgcaggagga

SEQ ID NO: 42204 - DNA, 21 bp, Artificial Sequence
  source: /note="Description of Artificial Sequence: Synthetic oligonucleotide"
gtcgtcagaaacgcaatcaac

SEQ ID NO: 42205 - DNA, 21 bp, Artificial Sequence
  source: /note="Description of Artificial Sequence: Synthetic oligonucleotide"
gtcgtcagaccaagcggactc

SEQ ID NO: 42206 - DNA, 21 bp, Artificial Sequence
  source: /note="Description of Artificial Sequence: Synthetic oligonucleotide"
gtcgtcagcgcaccactcgtc

SEQ ID NO: 42207 - DNA, 21 bp, Artificial Sequence
  source: /note="Description of Artificial Sequence: Synthetic oligonucleotide"
gtcgtcagcttcgacagagca

SEQ ID NO: 42208 - DNA, 21 bp, Artificial Sequence
  source: /note="Description of Artificial Sequence: Synthetic oligonucleotide"
gtcgtcagcggaagcagacca

SEQ ID NO: 42209 - DNA, 21 bp, Artificial Sequence
  source: /note="Description of Artificial Sequence: Synthetic oligonucleotide"
gtcgtcagccacatcagcgtc

SEQ ID NO: 42210 - DNA, 21 bp, Artificial Sequence
  source: /note="Description of Artificial Sequence: Synthetic oligonucleotide"
gtcgtcagcatcgcaagagtc

SEQ ID NO: 42211 - DNA, 21 bp, Artificial Sequence
  source: /note="Description of Artificial Sequence: Synthetic oligonucleotide"
gtcgtcagccaaccaagccca

SEQ ID NO: 42212 - DNA, 21 bp, Artificial Sequence
  source: /note="Description of Artificial Sequence: Synthetic oligonucleotide"
gtcgtcagcagaccaatcagc

SEQ ID NO: 42213 - DNA, 21 bp, Artificial Sequence
  source: /note="Description of Artificial Sequence: Synthetic oligonucleotide"
gtcgtcagcagaagctacaac

SEQ ID NO: 42214 - DNA, 21 bp, Artificial Sequence
  source: /note="Description of Artificial Sequence: Synthetic oligonucleotide"
gtcgtcagcagagtcgcaagc

SEQ ID NO: 42215 - DNA, 21 bp, Artificial Sequence
  source: /note="Description of Artificial Sequence: Synthetic oligonucleotide"
gtcgtcagcagcggaagcctc

SEQ ID NO: 42216 - DNA, 21 bp, Artificial Sequence
  source: /note="Description of Artificial Sequence: Synthetic oligonucleotide"
gtcgtcagcagcagcctcatg

SEQ ID NO: 42217 - DNA, 21 bp, Artificial Sequence
  source: /note="Description of Artificial Sequence: Synthetic oligonucleotide"
gtcgtcagcacaacactccca

SEQ ID NO: 42218 - DNA, 21 bp, Artificial Sequence
  source: /note="Description of Artificial Sequence: Synthetic oligonucleotide"
gtcgtcagcgtcgcaacaagc

SEQ ID NO: 42219 - DNA, 21 bp, Artificial Sequence
  source: /note="Description of Artificial Sequence: Synthetic oligonucleotide"
gtcgtcacagacagcggagga

SEQ ID NO: 42220 - DNA, 21 bp, Artificial Sequence
  source: /note="Description of Artificial Sequence: Synthetic oligonucleotide"
gtcgtcacaagcgcaagcgga

SEQ ID NO: 42221 - DNA, 21 bp, Artificial Sequence
  source: /note="Description of Artificial Sequence: Synthetic oligonucleotide"
gtcgtcacaacaagaatcaca

SEQ ID NO: 42222 - DNA, 21 bp, Artificial Sequence
  source: /note="Description of Artificial Sequence: Synthetic oligonucleotide"
gtcgtcgtcgcaggaagcgaa

SEQ ID NO: 42223 - DNA, 21 bp, Artificial Sequence
  source: /note="Description of Artificial Sequence: Synthetic oligonucleotide"
gtctgggcagacgacaacgtc

SEQ ID NO: 42224 - DNA, 21 bp, Artificial Sequence
  source: /note="Description of Artificial Sequence: Synthetic oligonucleotide"
gtctgggcaagaggaagcgaa

SEQ ID NO: 42225 - DNA, 21 bp, Artificial Sequence
  source: /note="Description of Artificial Sequence: Synthetic oligonucleotide"
gtctggccagcaagcggaaca

SEQ ID NO: 42226 - DNA, 21 bp, Artificial Sequence
  source: /note="Description of Artificial Sequence: Synthetic oligonucleotide"
gtctggcaaccaagcaacgac

SEQ ID NO: 42227 - DNA, 21 bp, Artificial Sequence
  source: /note="Description of Artificial Sequence: Synthetic oligonucleotide"
gtctggagcggaagcagcgac

SEQ ID NO: 42228 - DNA, 21 bp, Artificial Sequence
  source: /note="Description of Artificial Sequence: Synthetic oligonucleotide"
gtctggacacacgaaacaagc

SEQ ID NO: 42229 - DNA, 21 bp, Artificial Sequence
  source: /note="Description of Artificial Sequence: Synthetic oligonucleotide"
gtctacgcaccagaaaaaaga

SEQ ID NO: 42230 - DNA, 21 bp, Artificial Sequence
  source: /note="Description of Artificial Sequence: Synthetic oligonucleotide"
gtctacgcaacactcccagaa

SEQ ID NO: 42231 - DNA, 21 bp, Artificial Sequence
  source: /note="Description of Artificial Sequence: Synthetic oligonucleotide"
gtctacgaaccaagcaaatac

SEQ ID NO: 42232 - DNA, 21 bp, Artificial Sequence
  source: /note="Description of Artificial Sequence: Synthetic oligonucleotide"
gtctacgaaagcaacagattc

SEQ ID NO: 42233 - DNA, 21 bp, Artificial Sequence
  source: /note="Description of Artificial Sequence: Synthetic oligonucleotide"
gtctacggatacagcggaagc

SEQ ID NO: 42234 - DNA, 21 bp, Artificial Sequence
  source: /note="Description of Artificial Sequence: Synthetic oligonucleotide"
gtctaccacccaaacgaattc

SEQ ID NO: 42235 - DNA, 21 bp, Artificial Sequence
  source: /note="Description of Artificial Sequence: Synthetic oligonucleotide"
gtctacatcggaagacaagaa

SEQ ID NO: 42236 - DNA, 21 bp, Artificial Sequence
  source: /note="Description of Artificial Sequence: Synthetic oligonucleotide"
gtctacaaagcaagcaactac

SEQ ID NO: 42237 - DNA, 21 bp, Artificial Sequence
  source: /note="Description of Artificial Sequence: Synthetic oligonucleotide"
gtctacctcaaaagcagcaca

SEQ ID NO: 42238 - DNA, 21 bp, Artificial Sequence
  source: /note="Description of Artificial Sequence: Synthetic oligonucleotide"
gtctacaacgcaggagtcgac

SEQ ID NO: 42239 - DNA, 21 bp, Artificial Sequence
  source: /note="Description of Artificial Sequence: Synthetic oligonucleotide"
gtctacaacacaagcacagca

SEQ ID NO: 42240 - DNA, 21 bp, Artificial Sequence
  source: /note="Description of Artificial Sequence: Synthetic oligonucleotide"
gtctacccaccaagcacaaca

SEQ ID NO: 42241 - DNA, 21 bp, Artificial Sequence
  source: /note="Description of Artificial Sequence: Synthetic oligonucleotide"
gtctacccaagagacctcaca

SEQ ID NO: 42242 - DNA, 21 bp, Artificial Sequence
  source: /note="Description of Artificial Sequence: Synthetic oligonucleotide"
gtctacagagacagcacacca

SEQ ID NO: 42243 - DNA, 21 bp, Artificial Sequence
  source: /note="Description of Artificial Sequence: Synthetic oligonucleotide"
gtctacagaagccacgaaaca

SEQ ID NO: 42244 - DNA, 21 bp, Artificial Sequence
  source: /note="Description of Artificial Sequence: Synthetic oligonucleotide"
gtctacagcctcggaggactc

SEQ ID NO: 42245 - DNA, 21 bp, Artificial Sequence
  source: /note="Description of Artificial Sequence: Synthetic oligonucleotide"
gtctacagcaacatgacagga

SEQ ID NO: 42246 - DNA, 21 bp, Artificial Sequence
  source: /note="Description of Artificial Sequence: Synthetic oligonucleotide"
gtctacagccaaggagcaaga

SEQ ID NO: 42247 - DNA, 21 bp, Artificial Sequence
  source: /note="Description of Artificial Sequence: Synthetic oligonucleotide"
gtctacacagcagcaagagca

SEQ ID NO: 42248 - DNA, 21 bp, Artificial Sequence
  source: /note="Description of Artificial Sequence: Synthetic oligonucleotide"
gtctacacacaaaacagccca

SEQ ID NO: 42249 - DNA, 21 bp, Artificial Sequence
  source: /note="Description of Artificial Sequence: Synthetic oligonucleotide"
gtctacacaagcagcatgcac

SEQ ID NO: 42250 - DNA, 21 bp, Artificial Sequence
  source: /note="Description of Artificial Sequence: Synthetic oligonucleotide"
gtctactacggaaaagaacca

SEQ ID NO: 42251 - DNA, 21 bp, Artificial Sequence
  source: /note="Description of Artificial Sequence: Synthetic oligonucleotide"
tgggcagacaaaagccaccca

SEQ ID NO: 42252 - DNA, 21 bp, Artificial Sequence
  source: /note="Description of Artificial Sequence: Synthetic oligonucleotide"
tgggcagacaacagcgtcaac

SEQ ID NO: 42253 - DNA, 21 bp, Artificial Sequence
  source: /note="Description of Artificial Sequence: Synthetic oligonucleotide"
tgggcagacacaacaacaaga

SEQ ID NO: 42254 - DNA, 21 bp, Artificial Sequence
  source: /note="Description of Artificial Sequence: Synthetic oligonucleotide"
tgggcaggagcaatgccaatg

SEQ ID NO: 42255 - DNA, 21 bp, Artificial Sequence
  source: /note="Description of Artificial Sequence: Synthetic oligonucleotide"
tgggcacacaaaggactccca

SEQ ID NO: 42256 - DNA, 21 bp, Artificial Sequence
  source: /note="Description of Artificial Sequence: Synthetic oligonucleotide"
tgggcaaaaagccaactcgca

SEQ ID NO: 42257 - DNA, 21 bp, Artificial Sequence
  source: /note="Description of Artificial Sequence: Synthetic oligonucleotide"
tgggcaccaagaagcccagga

SEQ ID NO: 42258 - DNA, 21 bp, Artificial Sequence
  source: /note="Description of Artificial Sequence: Synthetic oligonucleotide"
tgggcaagcgcagaaagacaa

SEQ ID NO: 42259 - DNA, 21 bp, Artificial Sequence
  source: /note="Description of Artificial Sequence: Synthetic oligonucleotide"
tgggcaagcggacaccaagca

SEQ ID NO: 42260 - DNA, 21 bp, Artificial Sequence
  source: /note="Description of Artificial Sequence: Synthetic oligonucleotide"
tgggcaagcccaatcagagga

SEQ ID NO: 42261 - DNA, 21 bp, Artificial Sequence
  source: /note="Description of Artificial Sequence: Synthetic oligonucleotide"
tgggcaacagaactcagagga

SEQ ID NO: 42262 - DNA, 21 bp, Artificial Sequence
  source: /note="Description of Artificial Sequence: Synthetic oligonucleotide"
tgggcaacaggaagcagccca

SEQ ID NO: 42263 - DNA, 21 bp, Artificial Sequence
  source: /note="Description of Artificial Sequence: Synthetic oligonucleotide"
tggtgccaaagaccaggagca

SEQ ID NO: 42264 - DNA, 21 bp, Artificial Sequence
  source: /note="Description of Artificial Sequence: Synthetic oligonucleotide"
tgggacgcagcagtcacactc

SEQ ID NO: 42265 - DNA, 21 bp, Artificial Sequence
  source: /note="Description of Artificial Sequence: Synthetic oligonucleotide"
tgggacgcattcagcacagac

SEQ ID NO: 42266 - DNA, 21 bp, Artificial Sequence
  source: /note="Description of Artificial Sequence: Synthetic oligonucleotide"
tgggacgcactcgaaccagtc

SEQ ID NO: 42267 - DNA, 21 bp, Artificial Sequence
  source: /note="Description of Artificial Sequence: Synthetic oligonucleotide"
tgggacgcaatgacagcacca

SEQ ID NO: 42268 - DNA, 21 bp, Artificial Sequence
  source: /note="Description of Artificial Sequence: Synthetic oligonucleotide"
tgggacgcaacagcaccaaca

SEQ ID NO: 42269 - DNA, 21 bp, Artificial Sequence
  source: /note="Description of Artificial Sequence: Synthetic oligonucleotide"
tgggacgacggaggaacacca

SEQ ID NO: 42270 - DNA, 21 bp, Artificial Sequence
  source: /note="Description of Artificial Sequence: Synthetic oligonucleotide"
tgggacatcacaaaaacattc

SEQ ID NO: 42271 - DNA, 21 bp, Artificial Sequence
  source: /note="Description of Artificial Sequence: Synthetic oligonucleotide"
tgggacaaaaaaccaacaatc

SEQ ID NO: 42272 - DNA, 21 bp, Artificial Sequence
  source: /note="Description of Artificial Sequence: Synthetic oligonucleotide"
tgggacccagcatacggaagc

SEQ ID NO: 42273 - DNA, 21 bp, Artificial Sequence
  source: /note="Description of Artificial Sequence: Synthetic oligonucleotide"
tgggacccaagaaacagccaa

SEQ ID NO: 42274 - DNA, 21 bp, Artificial Sequence
  source: /note="Description of Artificial Sequence: Synthetic oligonucleotide"
tgggacccaagcagaacaaca

SEQ ID NO: 42275 - DNA, 21 bp, Artificial Sequence
  source: /note="Description of Artificial Sequence: Synthetic oligonucleotide"
tgggaccaactcgaaagagca

SEQ ID NO: 42276 - DNA, 21 bp, Artificial Sequence
  source: /note="Description of Artificial Sequence: Synthetic oligonucleotide"
tgggaccaaccacaccaagca

SEQ ID NO: 42277 - DNA, 21 bp, Artificial Sequence
  source: /note="Description of Artificial Sequence: Synthetic oligonucleotide"
tgggacagagacgcagcactc

SEQ ID NO: 42278 - DNA, 21 bp, Artificial Sequence
  source: /note="Description of Artificial Sequence: Synthetic oligonucleotide"
tgggacagcggaagcctcgga

SEQ ID NO: 42279 - DNA, 21 bp, Artificial Sequence
  source: /note="Description of Artificial Sequence: Synthetic oligonucleotide"
tgggacagcagacaccacgtc

SEQ ID NO: 42280 - DNA, 21 bp, Artificial Sequence
  source: /note="Description of Artificial Sequence: Synthetic oligonucleotide"
tgggacacaccaggacaaagc

SEQ ID NO: 42281 - DNA, 21 bp, Artificial Sequence
  source: /note="Description of Artificial Sequence: Synthetic oligonucleotide"
tgggacacacaattcagcagc

SEQ ID NO: 42282 - DNA, 21 bp, Artificial Sequence
  source: /note="Description of Artificial Sequence: Synthetic oligonucleotide"
tgggaagcacactggacacca

SEQ ID NO: 42283 - DNA, 21 bp, Artificial Sequence
  source: /note="Description of Artificial Sequence: Synthetic oligonucleotide"
tgggaaggagcaaacccagtc

SEQ ID NO: 42284 - DNA, 21 bp, Artificial Sequence
  source: /note="Description of Artificial Sequence: Synthetic oligonucleotide"
tgggaaggaagccacccatac

SEQ ID NO: 42285 - DNA, 21 bp, Artificial Sequence
  source: /note="Description of Artificial Sequence: Synthetic oligonucleotide"
tgggaaggaagcaaagacttc

SEQ ID NO: 42286 - DNA, 21 bp, Artificial Sequence
  source: /note="Description of Artificial Sequence: Synthetic oligonucleotide"
tgggaaatgacaagagtcgac

SEQ ID NO: 42287 - DNA, 21 bp, Artificial Sequence
  source: /note="Description of Artificial Sequence: Synthetic oligonucleotide"
tgggaaagaagcagaagcgca

SEQ ID NO: 42288 - DNA, 21 bp, Artificial Sequence
  source: /note="Description of Artificial Sequence: Synthetic oligonucleotide"
tgggaaagcggaggaggattc

SEQ ID NO: 42289 - DNA, 21 bp, Artificial Sequence
  source: /note="Description of Artificial Sequence: Synthetic oligonucleotide"
tggttcgaagacagactcgac

SEQ ID NO: 42290 - DNA, 21 bp, Artificial Sequence
  source: /note="Description of Artificial Sequence: Synthetic oligonucleotide"
tggttcgaaaaatgcaaagac

SEQ ID NO: 42291 - DNA, 21 bp, Artificial Sequence
  source: /note="Description of Artificial Sequence: Synthetic oligonucleotide"
tggttcccaagcggacacgca

SEQ ID NO: 42292 - DNA, 21 bp, Artificial Sequence
  source: /note="Description of Artificial Sequence: Synthetic oligonucleotide"
tggggagcagcactcacacca

SEQ ID NO: 42293 - DNA, 21 bp, Artificial Sequence
  source: /note="Description of Artificial Sequence: Synthetic oligonucleotide"
tggggagcaagactcgacagc

SEQ ID NO: 42294 - DNA, 21 bp, Artificial Sequence
  source: /note="Description of Artificial Sequence: Synthetic oligonucleotide"
tggggagcaagccaaacaagc

SEQ ID NO: 42295 - DNA, 21 bp, Artificial Sequence
  source: /note="Description of Artificial Sequence: Synthetic oligonucleotide"
tggggaggaacaagcccagga

SEQ ID NO: 42296 - DNA, 21 bp, Artificial Sequence
  source: /note="Description of Artificial Sequence: Synthetic oligonucleotide"
tggggacacaacaacagccca

SEQ ID NO: 42297 - DNA, 21 bp, Artificial Sequence
  source: /note="Description of Artificial Sequence: Synthetic oligonucleotide"
tggggacacagcagcggagtc

SEQ ID NO: 42298 - DNA, 21 bp, Artificial Sequence
  source: /note="Description of Artificial Sequence: Synthetic oligonucleotide"
tggggactcctccacagcgca

SEQ ID NO: 42299 - DNA, 21 bp, Artificial Sequence
  source: /note="Description of Artificial Sequence: Synthetic oligonucleotide"
tggggactcgtcacaagccca

SEQ ID NO: 42300 - DNA, 21 bp, Artificial Sequence
  source: /note="Description of Artificial Sequence: Synthetic oligonucleotide"
tggggaaaccaacaaccaaga

SEQ ID NO: 42301 - DNA, 21 bp, Artificial Sequence
  source: /note="Description of Artificial Sequence: Synthetic oligonucleotide"
tggggaaacagccacaacaca

SEQ ID NO: 42302 - DNA, 21 bp, Artificial Sequence
  source: /note="Description of Artificial Sequence: Synthetic oligonucleotide"
tggggaccaacaacaagccac

SEQ ID NO: 42303 - DNA, 21 bp, Artificial Sequence
  source: /note="Description of Artificial Sequence: Synthetic oligonucleotide"
tggggaagcggagcagcagga

SEQ ID NO: 42304 - DNA, 21 bp, Artificial Sequence
  source: /note="Description of Artificial Sequence: Synthetic oligonucleotide"
tggggaagcggagcagaaaca

SEQ ID NO: 42305 - DNA, 21 bp, Artificial Sequence
  source: /note="Description of Artificial Sequence: Synthetic oligonucleotide"
tggggaagcagcggacaagga

SEQ ID NO: 42306 - DNA, 21 bp, Artificial Sequence
  source: /note="Description of Artificial Sequence: Synthetic oligonucleotide"
tggggaacacaactcgcaatg

SEQ ID NO: 42307 - DNA, 21 bp, Artificial Sequence
  source: /note="Description of Artificial Sequence: Synthetic oligonucleotide"
tggggaacaagcgacaaaagc

SEQ ID NO: 42308 - DNA, 21 bp, Artificial Sequence
  source: /note="Description of Artificial Sequence: Synthetic oligonucleotide"
tggggatacctccacgtcgca

SEQ ID NO: 42309 - DNA, 21 bp, Artificial Sequence
  source: /note="Description of Artificial Sequence: Synthetic oligonucleotide"
tggcacggaacaggactcatc

SEQ ID NO: 42310 - DNA, 21 bp, Artificial Sequence
  source: /note="Description of Artificial Sequence: Synthetic oligonucleotide"
tggcacaaaagcagcagcagc

SEQ ID NO: 42311 - DNA, 21 bp, Artificial Sequence
  source: /note="Description of Artificial Sequence: Synthetic oligonucleotide"
tggcacccaagcggaagcaga

SEQ ID NO: 42312 - DNA, 21 bp, Artificial Sequence
  source: /note="Description of Artificial Sequence: Synthetic oligonucleotide"
tggcacagaacagcacaagac

SEQ ID NO: 42313 - DNA, 21 bp, Artificial Sequence
  source: /note="Description of Artificial Sequence: Synthetic oligonucleotide"
tggcacagcgcaaaactcgca

SEQ ID NO: 42314 - DNA, 21 bp, Artificial Sequence
  source: /note="Description of Artificial Sequence: Synthetic oligonucleotide"
tggcacagcctcatggaacca

SEQ ID NO: 42315 - DNA, 21 bp, Artificial Sequence
  source: /note="Description of Artificial Sequence: Synthetic oligonucleotide"
tggcacagcagaatgtacgaa

SEQ ID NO: 42316 - DNA, 21 bp, Artificial Sequence
  source: /note="Description of Artificial Sequence: Synthetic oligonucleotide"
tggcacagcagcgcaacacaa

SEQ ID NO: 42317 - DNA, 21 bp, Artificial Sequence
  source: /note="Description of Artificial Sequence: Synthetic oligonucleotide"
tggcacagcagcgacctcgtc

SEQ ID NO: 42318 - DNA, 21 bp, Artificial Sequence
  source: /note="Description of Artificial Sequence: Synthetic oligonucleotide"
tggatcggaaacggaggacca

SEQ ID NO: 42319 - DNA, 21 bp, Artificial Sequence
  source: /note="Description of Artificial Sequence: Synthetic oligonucleotide"
tggatcggacaaaacacagtc

SEQ ID NO: 42320 - DNA, 21 bp, Artificial Sequence
  source: /note="Description of Artificial Sequence: Synthetic oligonucleotide"
tggatcaaagaagcaagcagc

SEQ ID NO: 42321 - DNA, 21 bp, Artificial Sequence
  source: /note="Description of Artificial Sequence: Synthetic oligonucleotide"
tggatcccaggagcaccaagc

SEQ ID NO: 42322 - DNA, 21 bp, Artificial Sequence
  source: /note="Description of Artificial Sequence: Synthetic oligonucleotide"
tggatcccacaacaagacgtc

SEQ ID NO: 42323 - DNA, 21 bp, Artificial Sequence
  source: /note="Description of Artificial Sequence: Synthetic oligonucleotide"
tggatcccaagcggactcagc

SEQ ID NO: 42324 - DNA, 21 bp, Artificial Sequence
  source: /note="Description of Artificial Sequence: Synthetic oligonucleotide"
tggatcacaacagaaccactc

SEQ ID NO: 42325 - DNA, 21 bp, Artificial Sequence
  source: /note="Description of Artificial Sequence: Synthetic oligonucleotide"
tggaaagcaaacctcccaagc

SEQ ID NO: 42326 - DNA, 21 bp, Artificial Sequence
  source: /note="Description of Artificial Sequence: Synthetic oligonucleotide"
tggaaagacgaatgccaaaca

SEQ ID NO: 42327 - DNA, 21 bp, Artificial Sequence
  source: /note="Description of Artificial Sequence: Synthetic oligonucleotide"
tggaaagacagccactacgaa

SEQ ID NO: 42328 - DNA, 21 bp, Artificial Sequence
  source: /note="Description of Artificial Sequence: Synthetic oligonucleotide"
tggaaagaacacggagcagca

SEQ ID NO: 42329 - DNA, 21 bp, Artificial Sequence
  source: /note="Description of Artificial Sequence: Synthetic oligonucleotide"
tggaaacacagcacacaaagc

SEQ ID NO: 42330 - DNA, 21 bp, Artificial Sequence
  source: /note="Description of Artificial Sequence: Synthetic oligonucleotide"
tggaaaatcatgatcgcagaa

SEQ ID NO: 42331 - DNA, 21 bp, Artificial Sequence
  source: /note="Description of Artificial Sequence: Synthetic oligonucleotide"
tggaaaaaaaacatggacttc

SEQ ID NO: 42332 - DNA, 21 bp, Artificial Sequence
  source: /note="Description of Artificial Sequence: Synthetic oligonucleotide"
tggaaactcaacagagaccaa

SEQ ID NO: 42333 - DNA, 21 bp, Artificial Sequence
  source: /note="Description of Artificial Sequence: Synthetic oligonucleotide"
tggaaaaacacaagctgcgga

SEQ ID NO: 42334 - DNA, 21 bp, Artificial Sequence
  source: /note="Description of Artificial Sequence: Synthetic oligonucleotide"
tggaaaccagcagtcccacaa

SEQ ID NO: 42335 - DNA, 21 bp, Artificial Sequence
  source: /note="Description of Artificial Sequence: Synthetic oligonucleotide"
tggaaaccagaaatcctccca

SEQ ID NO: 42336 - DNA, 21 bp, Artificial Sequence
  source: /note="Description of Artificial Sequence: Synthetic oligonucleotide"
tggaaaccaccactcaaccca

SEQ ID NO: 42337 - DNA, 21 bp, Artificial Sequence
  source: /note="Description of Artificial Sequence: Synthetic oligonucleotide"
tggaaacaaggaagcacagga

SEQ ID NO: 42338 - DNA, 21 bp, Artificial Sequence
  source: /note="Description of Artificial Sequence: Synthetic oligonucleotide"
tggaaaagcgacagcgcaagc

SEQ ID NO: 42339 - DNA, 21 bp, Artificial Sequence
  source: /note="Description of Artificial Sequence: Synthetic oligonucleotide"
tggaaaagcaacacactcaca

SEQ ID NO: 42340 - DNA, 21 bp, Artificial Sequence
  source: /note="Description of Artificial Sequence: Synthetic oligonucleotide"
tggaaaagccaaatcccactc

SEQ ID NO: 42341 - DNA, 21 bp, Artificial Sequence
  source: /note="Description of Artificial Sequence: Synthetic oligonucleotide"
tggaaaagccaactcccaaac

SEQ ID NO: 42342 - DNA, 21 bp, Artificial Sequence
  source: /note="Description of Artificial Sequence: Synthetic oligonucleotide"
tggaaaagccaaatgaaccca

SEQ ID NO: 42343 - DNA, 21 bp, Artificial Sequence
  source: /note="Description of Artificial Sequence: Synthetic oligonucleotide"
tggaaaagcacagacctcaca

SEQ ID NO: 42344 - DNA, 21 bp, Artificial Sequence
  source: /note="Description of Artificial Sequence: Synthetic oligonucleotide"
tggaaagtcagcacagacaca

SEQ ID NO: 42345 - DNA, 21 bp, Artificial Sequence
  source: /note="Description of Artificial Sequence: Synthetic oligonucleotide"
tggctcgcagacccaagcgac

SEQ ID NO: 42346 - DNA, 21 bp, Artificial Sequence
  source: /note="Description of Artificial Sequence: Synthetic oligonucleotide"
tggctcgaaaacagccaaagc

SEQ ID NO: 42347 - DNA, 21 bp, Artificial Sequence
  source: /note="Description of Artificial Sequence: Synthetic oligonucleotide"
tggctcgaaagcggaacagga

SEQ ID NO: 42348 - DNA, 21 bp, Artificial Sequence
  source: /note="Description of Artificial Sequence: Synthetic oligonucleotide"
tggctcggaagagcagacgca

SEQ ID NO: 42349 - DNA, 21 bp, Artificial Sequence
  source: /note="Description of Artificial Sequence: Synthetic oligonucleotide"
tggctccacgacacaacaagc

SEQ ID NO: 42350 - DNA, 21 bp, Artificial Sequence
  source: /note="Description of Artificial Sequence: Synthetic oligonucleotide"
tggctccacgaacaaccaaac

SEQ ID NO: 42351 - DNA, 21 bp, Artificial Sequence
  source: /note="Description of Artificial Sequence: Synthetic oligonucleotide"
tggctccacagaagcaacgca

SEQ ID NO: 42352 - DNA, 21 bp, Artificial Sequence
  source: /note="Description of Artificial Sequence: Synthetic oligonucleotide"
tggctcaaacaaacagacaac

SEQ ID NO: 42353 - DNA, 21 bp, Artificial Sequence
  source: /note="Description of Artificial Sequence: Synthetic oligonucleotide"
tggctcctcaaccaagaagaa

SEQ ID NO: 42354 - DNA, 21 bp, Artificial Sequence
  source: /note="Description of Artificial Sequence: Synthetic oligonucleotide"
tggctcaacgacagcagcaga

SEQ ID NO: 42355 - DNA, 21 bp, Artificial Sequence
  source: /note="Description of Artificial Sequence: Synthetic oligonucleotide"
tggctcccaaaactcccacac

SEQ ID NO: 42356 - DNA, 21 bp, Artificial Sequence
  source: /note="Description of Artificial Sequence: Synthetic oligonucleotide"
tggctcccaacacaaacagaa

SEQ ID NO: 42357 - DNA, 21 bp, Artificial Sequence
  source: /note="Description of Artificial Sequence: Synthetic oligonucleotide"
tggctcagaacaccagacgca

SEQ ID NO: 42358 - DNA, 21 bp, Artificial Sequence
  source: /note="Description of Artificial Sequence: Synthetic oligonucleotide"
tggctcacaagcctcaaaatg

SEQ ID NO: 42359 - DNA, 21 bp, Artificial Sequence
  source: /note="Description of Artificial Sequence: Synthetic oligonucleotide"
tggctcacaagcccaaacgtc

SEQ ID NO: 42360 - DNA, 21 bp, Artificial Sequence
  source: /note="Description of Artificial Sequence: Synthetic oligonucleotide"
tggatggcaatgagacaagac

SEQ ID NO: 42361 - DNA, 21 bp, Artificial Sequence
  source: /note="Description of Artificial Sequence: Synthetic oligonucleotide"
tggatgctccaagaaacaagc

SEQ ID NO: 42362 - DNA, 21 bp, Artificial Sequence
  source: /note="Description of Artificial Sequence: Synthetic oligonucleotide"
tggatgatggaaagcagacca

SEQ ID NO: 42363 - DNA, 21 bp, Artificial Sequence
  source: /note="Description of Artificial Sequence: Synthetic oligonucleotide"
tggatgcaaagcgcaaacaga

SEQ ID NO: 42364 - DNA, 21 bp, Artificial Sequence
  source: /note="Description of Artificial Sequence: Synthetic oligonucleotide"
tggatgagcagactcccagca

SEQ ID NO: 42365 - DNA, 21 bp, Artificial Sequence
  source: /note="Description of Artificial Sequence: Synthetic oligonucleotide"
tggaacgacgtcacagcaaga

SEQ ID NO: 42366 - DNA, 21 bp, Artificial Sequence
  source: /note="Description of Artificial Sequence: Synthetic oligonucleotide"
tggaacaaaagcctcctcagc

SEQ ID NO: 42367 - DNA, 21 bp, Artificial Sequence
  source: /note="Description of Artificial Sequence: Synthetic oligonucleotide"
tggaacaaaacagaactcgac

SEQ ID NO: 42368 - DNA, 21 bp, Artificial Sequence
  source: /note="Description of Artificial Sequence: Synthetic oligonucleotide"
tggaacctcgaaagcacaaca

SEQ ID NO: 42369 - DNA, 21 bp, Artificial Sequence
  source: /note="Description of Artificial Sequence: Synthetic oligonucleotide"
tggaacaacccagaccaactc

SEQ ID NO: 42370 - DNA, 21 bp, Artificial Sequence
  source: /note="Description of Artificial Sequence: Synthetic oligonucleotide"
tggaacccaccactcccagca

SEQ ID NO: 42371 - DNA, 21 bp, Artificial Sequence
  source: /note="Description of Artificial Sequence: Synthetic oligonucleotide"
tggaacccaagaagcagcgaa

SEQ ID NO: 42372 - DNA, 21 bp, Artificial Sequence
  source: /note="Description of Artificial Sequence: Synthetic oligonucleotide"
tggaacacacaacaaggagtc

SEQ ID NO: 42373 - DNA, 21 bp, Artificial Sequence
  source: /note="Description of Artificial Sequence: Synthetic oligonucleotide"
tggaacacaacactcccaatc

SEQ ID NO: 42374 - DNA, 21 bp, Artificial Sequence
  source: /note="Description of Artificial Sequence: Synthetic oligonucleotide"
tggaacacagtcacaatcaga

SEQ ID NO: 42375 - DNA, 21 bp, Artificial Sequence
  source: /note="Description of Artificial Sequence: Synthetic oligonucleotide"
tggccagcaaaaacagtcgaa

SEQ ID NO: 42376 - DNA, 21 bp, Artificial Sequence
  source: /note="Description of Artificial Sequence: Synthetic oligonucleotide"
tggccagcacaagtcagcagc

SEQ ID NO: 42377 - DNA, 21 bp, Artificial Sequence
  source: /note="Description of Artificial Sequence: Synthetic oligonucleotide"
tggccagcaagcgtcacagac

SEQ ID NO: 42378 - DNA, 21 bp, Artificial Sequence
  source: /note="Description of Artificial Sequence: Synthetic oligonucleotide"
tggccagaaaaaagactcaca

SEQ ID NO: 42379 - DNA, 21 bp, Artificial Sequence
  source: /note="Description of Artificial Sequence: Synthetic oligonucleotide"
tggccagaaagctacagcaca

SEQ ID NO: 42380 - DNA, 21 bp, Artificial Sequence
  source: /note="Description of Artificial Sequence: Synthetic oligonucleotide"
tggccaggaatgagcgcagga

SEQ ID NO: 42381 - DNA, 21 bp, Artificial Sequence
  source: /note="Description of Artificial Sequence: Synthetic oligonucleotide"
tggccaggaagcagccacgtc

SEQ ID NO: 42382 - DNA, 21 bp, Artificial Sequence
  source: /note="Description of Artificial Sequence: Synthetic oligonucleotide"
tggccaaacctcgtcagcgga

SEQ ID NO: 42383 - DNA, 21 bp, Artificial Sequence
  source: /note="Description of Artificial Sequence: Synthetic oligonucleotide"
tggccaccagcaagcacactc

SEQ ID NO: 42384 - DNA, 21 bp, Artificial Sequence
  source: /note="Description of Artificial Sequence: Synthetic oligonucleotide"
tggccaccagcagtcagcagc

SEQ ID NO: 42385 - DNA, 21 bp, Artificial Sequence
  source: /note="Description of Artificial Sequence: Synthetic oligonucleotide"
tggccaccaagcgtcaacgga

SEQ ID NO: 42386 - DNA, 21 bp, Artificial Sequence
  source: /note="Description of Artificial Sequence: Synthetic oligonucleotide"
tggccacaaagcagcagcgga

SEQ ID NO: 42387 - DNA, 21 bp, Artificial Sequence
  source: /note="Description of Artificial Sequence: Synthetic oligonucleotide"
tggccaagcatggacggaagc

SEQ ID NO: 42388 - DNA, 21 bp, Artificial Sequence
  source: /note="Description of Artificial Sequence: Synthetic oligonucleotide"
tggccaagcagcatccaaatc

SEQ ID NO: 42389 - DNA, 21 bp, Artificial Sequence
  source: /note="Description of Artificial Sequence: Synthetic oligonucleotide"
tggccaagcagcacactcagc

SEQ ID NO: 42390 - DNA, 21 bp, Artificial Sequence
  source: /note="Description of Artificial Sequence: Synthetic oligonucleotide"
tggccaacaatcatcaacaga

SEQ ID NO: 42391 - DNA, 21 bp, Artificial Sequence
  source: /note="Description of Artificial Sequence: Synthetic oligonucleotide"
tggccaacaaaaagcacacca

SEQ ID NO: 42392 - DNA, 21 bp, Artificial Sequence
  source: /note="Description of Artificial Sequence: Synthetic oligonucleotide"
tggccaacaaacagcagacca

SEQ ID NO: 42393 - DNA, 21 bp, Artificial Sequence
  source: /note="Description of Artificial Sequence: Synthetic oligonucleotide"
tggccaacaaacacaatccca

SEQ ID NO: 42394 - DNA, 21 bp, Artificial Sequence
  source: /note="Description of Artificial Sequence: Synthetic oligonucleotide"
tggccagtccaccacgcagca

SEQ ID NO: 42395 - DNA, 21 bp, Artificial Sequence
  source: /note="Description of Artificial Sequence: Synthetic oligonucleotide"
tggccagtcacaagctacgga

SEQ ID NO: 42396 - DNA, 21 bp, Artificial Sequence
  source: /note="Description of Artificial Sequence: Synthetic oligonucleotide"
tggccatacgacccaggaaga

SEQ ID NO: 42397 - DNA, 21 bp, Artificial Sequence
  source: /note="Description of Artificial Sequence: Synthetic oligonucleotide"
tggcaaggactcacacaagga

SEQ ID NO: 42398 - DNA, 21 bp, Artificial Sequence
  source: /note="Description of Artificial Sequence: Synthetic oligonucleotide"
tggcaactcgcaacacaacca

SEQ ID NO: 42399 - DNA, 21 bp, Artificial Sequence
  source: /note="Description of Artificial Sequence: Synthetic oligonucleotide"
tggcaaatgctcctcagcgaa

SEQ ID NO: 42400 - DNA, 21 bp, Artificial Sequence
  source: /note="Description of Artificial Sequence: Synthetic oligonucleotide"
tggcaacaactcagcgcaagc

SEQ ID NO: 42401 - DNA, 21 bp, Artificial Sequence
  source: /note="Description of Artificial Sequence: Synthetic oligonucleotide"
tggcaaagaagcggagacgtc

SEQ ID NO: 42402 - DNA, 21 bp, Artificial Sequence
  source: /note="Description of Artificial Sequence: Synthetic oligonucleotide"
tggcaaagccaagcaacaatg

SEQ ID NO: 42403 - DNA, 21 bp, Artificial Sequence
  source: /note="Description of Artificial Sequence: Synthetic oligonucleotide"
tggcaaacacaaagcagaagc

SEQ ID NO: 42404 - DNA, 21 bp, Artificial Sequence
  source: /note="Description of Artificial Sequence: Synthetic oligonucleotide"
tggcaatacagccacgaacca

SEQ ID NO: 42405 - DNA, 21 bp, Artificial Sequence
  source: /note="Description of Artificial Sequence: Synthetic oligonucleotide"
tggagagcaatgctcgaagaa

SEQ ID NO: 42406 - DNA, 21 bp, Artificial Sequence
  source: /note="Description of Artificial Sequence: Synthetic oligonucleotide"
tggagagcaccaggaagcgca

SEQ ID NO: 42407 - DNA, 21 bp, Artificial Sequence
  source: /note="Description of Artificial Sequence: Synthetic oligonucleotide"
tggagagacgcaacatgctgc

SEQ ID NO: 42408 - DNA, 21 bp, Artificial Sequence
  source: /note="Description of Artificial Sequence: Synthetic oligonucleotide"
tggagagaaagatacgcagca

SEQ ID NO: 42409 - DNA, 21 bp, Artificial Sequence
  source: /note="Description of Artificial Sequence: Synthetic oligonucleotide"
tggagaggactcgacatcgaa

SEQ ID NO: 42410 - DNA, 21 bp, Artificial Sequence
  source: /note="Description of Artificial Sequence: Synthetic oligonucleotide"
tggagacacgactacaacctc

SEQ ID NO: 42411 - DNA, 21 bp, Artificial Sequence
  source: /note="Description of Artificial Sequence: Synthetic oligonucleotide"
tggagacacacagaagcaatc

SEQ ID NO: 42412 - DNA, 21 bp, Artificial Sequence
  source: /note="Description of Artificial Sequence: Synthetic oligonucleotide"
tggagaatcacagcagaaagc

SEQ ID NO: 42413 - DNA, 21 bp, Artificial Sequence
  source: /note="Description of Artificial Sequence: Synthetic oligonucleotide"
tggagaccactcgtcgaaaca

SEQ ID NO: 42414 - DNA, 21 bp, Artificial Sequence
  source: /note="Description of Artificial Sequence: Synthetic oligonucleotide"
tggagaccaaacatggcagca

SEQ ID NO: 42415 - DNA, 21 bp, Artificial Sequence
  source: /note="Description of Artificial Sequence: Synthetic oligonucleotide"
tggagaccaaacatgagcgtc

SEQ ID NO: 42416 - DNA, 21 bp, Artificial Sequence
  source: /note="Description of Artificial Sequence: Synthetic oligonucleotide"
tggagaccacaaagaccagtc

SEQ ID NO: 42417 - DNA, 21 bp, Artificial Sequence
  source: /note="Description of Artificial Sequence: Synthetic oligonucleotide"
tggagacaagaaacaagcgtc

SEQ ID NO: 42418 - DNA, 21 bp, Artificial Sequence
  source: /note="Description of Artificial Sequence: Synthetic oligonucleotide"
tggagaagagacgcaagccca

SEQ ID NO: 42419 - DNA, 21 bp, Artificial Sequence
  source: /note="Description of Artificial Sequence: Synthetic oligonucleotide"
tggagaagcgcaagcagcgca

SEQ ID NO: 42420 - DNA, 21 bp, Artificial Sequence
  source: /note="Description of Artificial Sequence: Synthetic oligonucleotide"
tggagaagcagagaaatcgca

SEQ ID NO: 42421 - DNA, 21 bp, Artificial Sequence
  source: /note="Description of Artificial Sequence: Synthetic oligonucleotide"
tggagaagcagcgcagaagca

SEQ ID NO: 42422 - DNA, 21 bp, Artificial Sequence
  source: /note="Description of Artificial Sequence: Synthetic oligonucleotide"
tggagcgcagacccagacaca

SEQ ID NO: 42423 - DNA, 21 bp, Artificial Sequence
  source: /note="Description of Artificial Sequence: Synthetic oligonucleotide"
tggagcgcaagcagccaccaa

SEQ ID NO: 42424 - DNA, 21 bp, Artificial Sequence
  source: /note="Description of Artificial Sequence: Synthetic oligonucleotide"
tggagcgcagtcggagaagtc

SEQ ID NO: 42425 - DNA, 21 bp, Artificial Sequence
  source: /note="Description of Artificial Sequence: Synthetic oligonucleotide"
tggagcgacagcacagcagtc

SEQ ID NO: 42426 - DNA, 21 bp, Artificial Sequence
  source: /note="Description of Artificial Sequence: Synthetic oligonucleotide"
tggagcggacacccagtcgca

SEQ ID NO: 42427 - DNA, 21 bp, Artificial Sequence
  source: /note="Description of Artificial Sequence: Synthetic oligonucleotide"
tggagcggaaaagcaaacgca

SEQ ID NO: 42428 - DNA, 21 bp, Artificial Sequence
  source: /note="Description of Artificial Sequence: Synthetic oligonucleotide"
tggagcggaccaatcagcctc

SEQ ID NO: 42429 - DNA, 21 bp, Artificial Sequence
  source: /note="Description of Artificial Sequence: Synthetic oligonucleotide"
tggagccacggaccaatgcca

SEQ ID NO: 42430 - DNA, 21 bp, Artificial Sequence
  source: /note="Description of Artificial Sequence: Synthetic oligonucleotide"
tggagccacggaagcacaaca

SEQ ID NO: 42431 - DNA, 21 bp, Artificial Sequence
  source: /note="Description of Artificial Sequence: Synthetic oligonucleotide"
tggagcaaagtcccagacaga

SEQ ID NO: 42432 - DNA, 21 bp, Artificial Sequence
  source: /note="Description of Artificial Sequence: Synthetic oligonucleotide"
tggagcctcgtccacagagaa

SEQ ID NO: 42433 - DNA, 21 bp, Artificial Sequence
  source: /note="Description of Artificial Sequence: Synthetic oligonucleotide"
tggagcaaccacgcacacgca

SEQ ID NO: 42434 - DNA, 21 bp, Artificial Sequence
  source: /note="Description of Artificial Sequence: Synthetic oligonucleotide"
tggagcccagcaagagaaaca

SEQ ID NO: 42435 - DNA, 21 bp, Artificial Sequence
  source: /note="Description of Artificial Sequence: Synthetic oligonucleotide"
tggagcccactctaccacgca

SEQ ID NO: 42436 - DNA, 21 bp, Artificial Sequence
  source: /note="Description of Artificial Sequence: Synthetic oligonucleotide"
tggagcccaaacagcacacca

SEQ ID NO: 42437 - DNA, 21 bp, Artificial Sequence
  source: /note="Description of Artificial Sequence: Synthetic oligonucleotide"
tggagcccaaacgtctgccca

SEQ ID NO: 42438 - DNA, 21 bp, Artificial Sequence
  source: /note="Description of Artificial Sequence: Synthetic oligonucleotide"
tggagcccaagaaacacactc

SEQ ID NO: 42439 - DNA, 21 bp, Artificial Sequence
  source: /note="Description of Artificial Sequence: Synthetic oligonucleotide"
tggagcccaagcgaaggaaaa

SEQ ID NO: 42440 - DNA, 21 bp, Artificial Sequence
  source: /note="Description of Artificial Sequence: Synthetic oligonucleotide"
tggagcccaagccaagcatac

SEQ ID NO: 42441 - DNA, 21 bp, Artificial Sequence
  source: /note="Description of Artificial Sequence: Synthetic oligonucleotide"
tggagcccagtcgtcgtcaga

SEQ ID NO: 42442 - DNA, 21 bp, Artificial Sequence
  source: /note="Description of Artificial Sequence: Synthetic oligonucleotide"
tggagcagagcagcagtcgac

SEQ ID NO: 42443 - DNA, 21 bp, Artificial Sequence
  source: /note="Description of Artificial Sequence: Synthetic oligonucleotide"
tggagcagaccagcagcagac

SEQ ID NO: 42444 - DNA, 21 bp, Artificial Sequence
  source: /note="Description of Artificial Sequence: Synthetic oligonucleotide"
tggagcagacaagacctccca

SEQ ID NO: 42445 - DNA, 21 bp, Artificial Sequence
  source: /note="Description of Artificial Sequence: Synthetic oligonucleotide"
tggagcagcgcatacgtcagc

SEQ ID NO: 42446 - DNA, 21 bp, Artificial Sequence
  source: /note="Description of Artificial Sequence: Synthetic oligonucleotide"
tggagcagcgacgcaccagaa

SEQ ID NO: 42447 - DNA, 21 bp, Artificial Sequence
  source: /note="Description of Artificial Sequence: Synthetic oligonucleotide"
tggagcagcatgagcatgcac

SEQ ID NO: 42448 - DNA, 21 bp, Artificial Sequence
  source: /note="Description of Artificial Sequence: Synthetic oligonucleotide"
tggagcacaaaactcgaagga

SEQ ID NO: 42449 - DNA, 21 bp, Artificial Sequence
  source: /note="Description of Artificial Sequence: Synthetic oligonucleotide"
tggagcacaaacgcataccaa

SEQ ID NO: 42450 - DNA, 21 bp, Artificial Sequence
  source: /note="Description of Artificial Sequence: Synthetic oligonucleotide"
tggagcacaagcacactccac

SEQ ID NO: 42451 - DNA, 21 bp, Artificial Sequence
  source: /note="Description of Artificial Sequence: Synthetic oligonucleotide"
tggacagcaccaagcgacgtc

SEQ ID NO: 42452 - DNA, 21 bp, Artificial Sequence
  source: /note="Description of Artificial Sequence: Synthetic oligonucleotide"
tggacagcacaaaacgtccaa

SEQ ID NO: 42453 - DNA, 21 bp, Artificial Sequence
  source: /note="Description of Artificial Sequence: Synthetic oligonucleotide"
tggacagcaagcagagcaagc

SEQ ID NO: 42454 - DNA, 21 bp, Artificial Sequence
  source: /note="Description of Artificial Sequence: Synthetic oligonucleotide"
tggacagaaagagtcggaaca

SEQ ID NO: 42455 - DNA, 21 bp, Artificial Sequence
  source: /note="Description of Artificial Sequence: Synthetic oligonucleotide"
tggacaggaagcgcacaccaa

SEQ ID NO: 42456 - DNA, 21 bp, Artificial Sequence
  source: /note="Description of Artificial Sequence: Synthetic oligonucleotide"
tggacaggatacagccaacaa

SEQ ID NO: 42457 - DNA, 21 bp, Artificial Sequence
  source: /note="Description of Artificial Sequence: Synthetic oligonucleotide"
tggacaaacagcacacaacca

SEQ ID NO: 42458 - DNA, 21 bp, Artificial Sequence
  source: /note="Description of Artificial Sequence: Synthetic oligonucleotide"
tggacaccacacagcccaatg

SEQ ID NO: 42459 - DNA, 21 bp, Artificial Sequence
  source: /note="Description of Artificial Sequence: Synthetic oligonucleotide"
tggacaccaagagtcatgcac

SEQ ID NO: 42460 - DNA, 21 bp, Artificial Sequence
  source: /note="Description of Artificial Sequence: Synthetic oligonucleotide"
tggacaccaagcatggcacca

SEQ ID NO: 42461 - DNA, 21 bp, Artificial Sequence
  source: /note="Description of Artificial Sequence: Synthetic oligonucleotide"
tggacaccaagcaacaaacac

SEQ ID NO: 42462 - DNA, 21 bp, Artificial Sequence
  source: /note="Description of Artificial Sequence: Synthetic oligonucleotide"
tggacaagactcgaaagcctc

SEQ ID NO: 42463 - DNA, 21 bp, Artificial Sequence
  source: /note="Description of Artificial Sequence: Synthetic oligonucleotide"
tggacaagcgacggaaactac

SEQ ID NO: 42464 - DNA, 21 bp, Artificial Sequence
  source: /note="Description of Artificial Sequence: Synthetic oligonucleotide"
tggacaagcaaaatcggacca

SEQ ID NO: 42465 - DNA, 21 bp, Artificial Sequence
  source: /note="Description of Artificial Sequence: Synthetic oligonucleotide"
tggacaagcagagacgcaagc

SEQ ID NO: 42466 - DNA, 21 bp, Artificial Sequence
  source: /note="Description of Artificial Sequence: Synthetic oligonucleotide"
tggacaagcagcggaggaagc

SEQ ID NO: 42467 - DNA, 21 bp, Artificial Sequence
  source: /note="Description of Artificial Sequence: Synthetic oligonucleotide"
tggacaacaaacacaggagga

SEQ ID NO: 42468 - DNA, 21 bp, Artificial Sequence
  source: /note="Description of Artificial Sequence: Synthetic oligonucleotide"
tggacaacaagcggaagcatc

SEQ ID NO: 42469 - DNA, 21 bp, Artificial Sequence
  source: /note="Description of Artificial Sequence: Synthetic oligonucleotide"
tggacagtcgacctcacacac

SEQ ID NO: 42470 - DNA, 21 bp, Artificial Sequence
  source: /note="Description of Artificial Sequence: Synthetic oligonucleotide"
tggacagtcgaaacaagccac

SEQ ID NO: 42471 - DNA, 21 bp, Artificial Sequence
  source: /note="Description of Artificial Sequence: Synthetic oligonucleotide"
tgggtccacagcagcgacagc

SEQ ID NO: 42472 - DNA, 21 bp, Artificial Sequence
  source: /note="Description of Artificial Sequence: Synthetic oligonucleotide"
tgggtcatccaaaactgcaac

SEQ ID NO: 42473 - DNA, 21 bp, Artificial Sequence
  source: /note="Description of Artificial Sequence: Synthetic oligonucleotide"
tgggtccaaagcggaacacca

SEQ ID NO: 42474 - DNA, 21 bp, Artificial Sequence
  source: /note="Description of Artificial Sequence: Synthetic oligonucleotide"
tgggtcacaggactcacagac

SEQ ID NO: 42475 - DNA, 21 bp, Artificial Sequence
  source: /note="Description of Artificial Sequence: Synthetic oligonucleotide"
tgggtcacacaacacccaagc

SEQ ID NO: 42476 - DNA, 21 bp, Artificial Sequence
  source: /note="Description of Artificial Sequence: Synthetic oligonucleotide"
tacgcagcagcaccaagcaga

SEQ ID NO: 42477 - DNA, 21 bp, Artificial Sequence
  source: /note="Description of Artificial Sequence: Synthetic oligonucleotide"
tacgcagcagcatacgcaagc

SEQ ID NO: 42478 - DNA, 21 bp, Artificial Sequence
  source: /note="Description of Artificial Sequence: Synthetic oligonucleotide"
tacgcagcacactacaaagaa

SEQ ID NO: 42479 - DNA, 21 bp, Artificial Sequence
  source: /note="Description of Artificial Sequence: Synthetic oligonucleotide"
tacgcagcaaacagacaacca

SEQ ID NO: 42480 - DNA, 21 bp, Artificial Sequence
  source: /note="Description of Artificial Sequence: Synthetic oligonucleotide"
tacgcagcaccaagcagcgca

SEQ ID NO: 42481 - DNA, 21 bp, Artificial Sequence
  source: /note="Description of Artificial Sequence: Synthetic oligonucleotide"
tacgcagcaagccacgtcagc

SEQ ID NO: 42482 - DNA, 21 bp, Artificial Sequence
  source: /note="Description of Artificial Sequence: Synthetic oligonucleotide"
tacgcagcaagcaacctcaca

SEQ ID NO: 42483 - DNA, 21 bp, Artificial Sequence
  source: /note="Description of Artificial Sequence: Synthetic oligonucleotide"
tacgcagcaagcagcgcaaca

SEQ ID NO: 42484 - DNA, 21 bp, Artificial Sequence
  source: /note="Description of Artificial Sequence: Synthetic oligonucleotide"
tacgcagcagtcggactcaac

SEQ ID NO: 42485 - DNA, 21 bp, Artificial Sequence
  source: /note="Description of Artificial Sequence: Synthetic oligonucleotide"
tacgcagcagtcagaagcaac

SEQ ID NO: 42486 - DNA, 21 bp, Artificial Sequence
  source: /note="Description of Artificial Sequence: Synthetic oligonucleotide"
tacgcagacctcccaagcaga

SEQ ID NO: 42487 - DNA, 21 bp, Artificial Sequence
  source: /note="Description of Artificial Sequence: Synthetic oligonucleotide"
tacgcagacagcgcaccatac

SEQ ID NO: 42488 - DNA, 21 bp, Artificial Sequence
  source: /note="Description of Artificial Sequence: Synthetic oligonucleotide"
tacgcagaaagacaaggaaga

SEQ ID NO: 42489 - DNA, 21 bp, Artificial Sequence
  source: /note="Description of Artificial Sequence: Synthetic oligonucleotide"
tacgcagaatacagcagaaac

SEQ ID NO: 42490 - DNA, 21 bp, Artificial Sequence
  source: /note="Description of Artificial Sequence: Synthetic oligonucleotide"
tacgcaggagcagcactcgga

SEQ ID NO: 42491 - DNA, 21 bp, Artificial Sequence
  source: /note="Description of Artificial Sequence: Synthetic oligonucleotide"
tacgcaggagcacaaagaagc

SEQ ID NO: 42492 - DNA, 21 bp, Artificial Sequence
  source: /note="Description of Artificial Sequence: Synthetic oligonucleotide"
tacgcaggaggaaaactcatc

SEQ ID NO: 42493 - DNA, 21 bp, Artificial Sequence
  source: /note="Description of Artificial Sequence: Synthetic oligonucleotide"
tacgcaggaaaagaaccagaa

SEQ ID NO: 42494 - DNA, 21 bp, Artificial Sequence
  source: /note="Description of Artificial Sequence: Synthetic oligonucleotide"
tacgcaggaccaaacagccca

SEQ ID NO: 42495 - DNA, 21 bp, Artificial Sequence
  source: /note="Description of Artificial Sequence: Synthetic oligonucleotide"
tacgcaggaagcgaagtcatg

SEQ ID NO: 42496 - DNA, 21 bp, Artificial Sequence
  source: /note="Description of Artificial Sequence: Synthetic oligonucleotide"
tacgcaggaagcgtcacaagc

SEQ ID NO: 42497 - DNA, 21 bp, Artificial Sequence
  source: /note="Description of Artificial Sequence: Synthetic oligonucleotide"
tacgcacaccaaaaaccaatg

SEQ ID NO: 42498 - DNA, 21 bp, Artificial Sequence
  source: /note="Description of Artificial Sequence: Synthetic oligonucleotide"
tacgcacacacaagagtcgtc

SEQ ID NO: 42499 - DNA, 21 bp, Artificial Sequence
  source: /note="Description of Artificial Sequence: Synthetic oligonucleotide"
tacgcaaaaccactcacaagc

SEQ ID NO: 42500 - DNA, 21 bp, Artificial Sequence
  source: /note="Description of Artificial Sequence: Synthetic oligonucleotide"
tacgcactcgacagcgcagaa

SEQ ID NO: 42501 - DNA, 21 bp, Artificial Sequence
  source: /note="Description of Artificial Sequence: Synthetic oligonucleotide"
tacgcactcgaacacagaaac

SEQ ID NO: 42502 - DNA, 21 bp, Artificial Sequence
  source: /note="Description of Artificial Sequence: Synthetic oligonucleotide"
tacgcactccaccaagacaaa

SEQ ID NO: 42503 - DNA, 21 bp, Artificial Sequence
  source: /note="Description of Artificial Sequence: Synthetic oligonucleotide"
tacgcactccaaagcaaagaa

SEQ ID NO: 42504 - DNA, 21 bp, Artificial Sequence
  source: /note="Description of Artificial Sequence: Synthetic oligonucleotide"
tacgcactcagcggaagcaca

SEQ ID NO: 42505 - DNA, 21 bp, Artificial Sequence
  source: /note="Description of Artificial Sequence: Synthetic oligonucleotide"
tacgcaaacgcaatgacactc

SEQ ID NO: 42506 - DNA, 21 bp, Artificial Sequence
  source: /note="Description of Artificial Sequence: Synthetic oligonucleotide"
tacgcaaacgacagcggactc

SEQ ID NO: 42507 - DNA, 21 bp, Artificial Sequence
  source: /note="Description of Artificial Sequence: Synthetic oligonucleotide"
tacgcaaacaacctcccacac

SEQ ID NO: 42508 - DNA, 21 bp, Artificial Sequence
  source: /note="Description of Artificial Sequence: Synthetic oligonucleotide"
tacgcaaacacaacaagcgca

SEQ ID NO: 42509 - DNA, 21 bp, Artificial Sequence
  source: /note="Description of Artificial Sequence: Synthetic oligonucleotide"
tacgcaccaggactcagaagc

SEQ ID NO: 42510 - DNA, 21 bp, Artificial Sequence
  source: /note="Description of Artificial Sequence: Synthetic oligonucleotide"
tacgcaccacaaagcgtcgca

SEQ ID NO: 42511 - DNA, 21 bp, Artificial Sequence
  source: /note="Description of Artificial Sequence: Synthetic oligonucleotide"
tacgcacaagcattcagaaac

SEQ ID NO: 42512 - DNA, 21 bp, Artificial Sequence
  source: /note="Description of Artificial Sequence: Synthetic oligonucleotide"
tacgcacaatacagcgcagtc

SEQ ID NO: 42513 - DNA, 21 bp, Artificial Sequence
  source: /note="Description of Artificial Sequence: Synthetic oligonucleotide"
tacgcaagagaagcacacgca

SEQ ID NO: 42514 - DNA, 21 bp, Artificial Sequence
  source: /note="Description of Artificial Sequence: Synthetic oligonucleotide"
tacgcaagagaaacactccac

SEQ ID NO: 42515 - DNA, 21 bp, Artificial Sequence
  source: /note="Description of Artificial Sequence: Synthetic oligonucleotide"
tacgcaagactcacaggacca

SEQ ID NO: 42516 - DNA, 21 bp, Artificial Sequence
  source: /note="Description of Artificial Sequence: Synthetic oligonucleotide"
tacgcaagacaaatcacagca

SEQ ID NO: 42517 - DNA, 21 bp, Artificial Sequence
  source: /note="Description of Artificial Sequence: Synthetic oligonucleotide"
tacgcaagacaaccagcagtc

SEQ ID NO: 42518 - DNA, 21 bp, Artificial Sequence
  source: /note="Description of Artificial Sequence: Synthetic oligonucleotide"
tacgcaagcgcaagccaccca

SEQ ID NO: 42519 - DNA, 21 bp, Artificial Sequence
  source: /note="Description of Artificial Sequence: Synthetic oligonucleotide"
tacgcaagcctcaaaggagca

SEQ ID NO: 42520 - DNA, 21 bp, Artificial Sequence
  source: /note="Description of Artificial Sequence: Synthetic oligonucleotide"
tacgcaagcccaggaagaaca

SEQ ID NO: 42521 - DNA, 21 bp, Artificial Sequence
  source: /note="Description of Artificial Sequence: Synthetic oligonucleotide"
tacgcaagcagcgcagcactc

SEQ ID NO: 42522 - DNA, 21 bp, Artificial Sequence
  source: /note="Description of Artificial Sequence: Synthetic oligonucleotide"
tacgcaagcagcagcacaaga

SEQ ID NO: 42523 - DNA, 21 bp, Artificial Sequence
  source: /note="Description of Artificial Sequence: Synthetic oligonucleotide"
tacgcaacagaaagcggaaac

SEQ ID NO: 42524 - DNA, 21 bp, Artificial Sequence
  source: /note="Description of Artificial Sequence: Synthetic oligonucleotide"
tacgcaacattcgcaccagca

SEQ ID NO: 42525 - DNA, 21 bp, Artificial Sequence
  source: /note="Description of Artificial Sequence: Synthetic oligonucleotide"
tacgcaacacacgaaccagac

SEQ ID NO: 42526 - DNA, 21 bp, Artificial Sequence
  source: /note="Description of Artificial Sequence: Synthetic oligonucleotide"
tacgcaacaccaagccaccac

SEQ ID NO: 42527 - DNA, 21 bp, Artificial Sequence
  source: /note="Description of Artificial Sequence: Synthetic oligonucleotide"
tacgcaacaacagtcctcaca

SEQ ID NO: 42528 - DNA, 21 bp, Artificial Sequence
  source: /note="Description of Artificial Sequence: Synthetic oligonucleotide"
tacgcaacagtcatcggactc

SEQ ID NO: 42529 - DNA, 21 bp, Artificial Sequence
  source: /note="Description of Artificial Sequence: Synthetic oligonucleotide"
tacgcagtcgaagcaagcaga

SEQ ID NO: 42530 - DNA, 21 bp, Artificial Sequence
  source: /note="Description of Artificial Sequence: Synthetic oligonucleotide"
tacgcagtcgaaggaaaaaac

SEQ ID NO: 42531 - DNA, 21 bp, Artificial Sequence
  source: /note="Description of Artificial Sequence: Synthetic oligonucleotide"
tacgcagtcagcagaccactc

SEQ ID NO: 42532 - DNA, 21 bp, Artificial Sequence
  source: /note="Description of Artificial Sequence: Synthetic oligonucleotide"
tacgcatacgaaggattcgca

SEQ ID NO: 42533 - DNA, 21 bp, Artificial Sequence
  source: /note="Description of Artificial Sequence: Synthetic oligonucleotide"
tacgcatacgaaagacaaatc

SEQ ID NO: 42534 - DNA, 21 bp, Artificial Sequence
  source: /note="Description of Artificial Sequence: Synthetic oligonucleotide"
tactgcgaaagcttcccagac

SEQ ID NO: 42535 - DNA, 21 bp, Artificial Sequence
  source: /note="Description of Artificial Sequence: Synthetic oligonucleotide"
tactgcagccaccaaagcgtc

SEQ ID NO: 42536 - DNA, 21 bp, Artificial Sequence
  source: /note="Description of Artificial Sequence: Synthetic oligonucleotide"
tactgcacaggaaacgacgca

SEQ ID NO: 42537 - DNA, 21 bp, Artificial Sequence
  source: /note="Description of Artificial Sequence: Synthetic oligonucleotide"
tacgacgcaatcagcaaccca

SEQ ID NO: 42538 - DNA, 21 bp, Artificial Sequence
  source: /note="Description of Artificial Sequence: Synthetic oligonucleotide"
tacgaccacgtcatcgcaaca

SEQ ID NO: 42539 - DNA, 21 bp, Artificial Sequence
  source: /note="Description of Artificial Sequence: Synthetic oligonucleotide"
tacgacaaagcaatgagccca

SEQ ID NO: 42540 - DNA, 21 bp, Artificial Sequence
  source: /note="Description of Artificial Sequence: Synthetic oligonucleotide"
tacgacctcggagtcacaaca

SEQ ID NO: 42541 - DNA, 21 bp, Artificial Sequence
  source: /note="Description of Artificial Sequence: Synthetic oligonucleotide"
tacgacatgggaccagtccca

SEQ ID NO: 42542 - DNA, 21 bp, Artificial Sequence
  source: /note="Description of Artificial Sequence: Synthetic oligonucleotide"
tacgacaacaaaacaagactc

SEQ ID NO: 42543 - DNA, 21 bp, Artificial Sequence
  source: /note="Description of Artificial Sequence: Synthetic oligonucleotide"
tacgacaacatgcactgcaaa

SEQ ID NO: 42544 - DNA, 21 bp, Artificial Sequence
  source: /note="Description of Artificial Sequence: Synthetic oligonucleotide"
tacgacaaccaactcaacaac

SEQ ID NO: 42545 - DNA, 21 bp, Artificial Sequence
  source: /note="Description of Artificial Sequence: Synthetic oligonucleotide"
tacgacccataccacagccca

SEQ ID NO: 42546 - DNA, 21 bp, Artificial Sequence
  source: /note="Description of Artificial Sequence: Synthetic oligonucleotide"
tacgacagagaaccactcgac

SEQ ID NO: 42547 - DNA, 21 bp, Artificial Sequence
  source: /note="Description of Artificial Sequence: Synthetic oligonucleotide"
tacgacagcaacacagaaaca

SEQ ID NO: 42548 - DNA, 21 bp, Artificial Sequence
  source: /note="Description of Artificial Sequence: Synthetic oligonucleotide"
tacgacagcagaggaccagca

SEQ ID NO: 42549 - DNA, 21 bp, Artificial Sequence
  source: /note="Description of Artificial Sequence: Synthetic oligonucleotide"
tacgacagcagcgtcccaaac

SEQ ID NO: 42550 - DNA, 21 bp, Artificial Sequence
  source: /note="Description of Artificial Sequence: Synthetic oligonucleotide"
tacgacagcgtcgcaacactc

SEQ ID NO: 42551 - DNA, 21 bp, Artificial Sequence
  source: /note="Description of Artificial Sequence: Synthetic oligonucleotide"
tacgacacacacggaagccca

SEQ ID NO: 42552 - DNA, 21 bp, Artificial Sequence
  source: /note="Description of Artificial Sequence: Synthetic oligonucleotide"
tacgacacaaaactccaaatg

SEQ ID NO: 42553 - DNA, 21 bp, Artificial Sequence
  source: /note="Description of Artificial Sequence: Synthetic oligonucleotide"
tacgaagcaccaacaagaagc

SEQ ID NO: 42554 - DNA, 21 bp, Artificial Sequence
  source: /note="Description of Artificial Sequence: Synthetic oligonucleotide"
tacgaagcaacaagcagcaac

SEQ ID NO: 42555 - DNA, 21 bp, Artificial Sequence
  source: /note="Description of Artificial Sequence: Synthetic oligonucleotide"
tacgaaggaagcccaagaaac

SEQ ID NO: 42556 - DNA, 21 bp, Artificial Sequence
  source: /note="Description of Artificial Sequence: Synthetic oligonucleotide"
tacgaaggatacaaactccca

SEQ ID NO: 42557 - DNA, 21 bp, Artificial Sequence
  source: /note="Description of Artificial Sequence: Synthetic oligonucleotide"
tacgaaatccaaggaacagga

SEQ ID NO: 42558 - DNA, 21 bp, Artificial Sequence
  source: /note="Description of Artificial Sequence: Synthetic oligonucleotide"
tacgaactcgcacaccacgca

SEQ ID NO: 42559 - DNA, 21 bp, Artificial Sequence
  source: /note="Description of Artificial Sequence: Synthetic oligonucleotide"
tacgaactccaactcttcagc

SEQ ID NO: 42560 - DNA, 21 bp, Artificial Sequence
  source: /note="Description of Artificial Sequence: Synthetic oligonucleotide"
tacgaactcagaagaatccca

SEQ ID NO: 42561 - DNA, 21 bp, Artificial Sequence
  source: /note="Description of Artificial Sequence: Synthetic oligonucleotide"
tacgaaccaggaacagacgca

SEQ ID NO: 42562 - DNA, 21 bp, Artificial Sequence
  source: /note="Description of Artificial Sequence: Synthetic oligonucleotide"
tacgaaccaaaagtcagagtc

SEQ ID NO: 42563 - DNA, 21 bp, Artificial Sequence
  source: /note="Description of Artificial Sequence: Synthetic oligonucleotide"
tacgaaagcagcaacgaccca

SEQ ID NO: 42564 - DNA, 21 bp, Artificial Sequence
  source: /note="Description of Artificial Sequence: Synthetic oligonucleotide"
tacgaaagctacatcgaaaga

SEQ ID NO: 42565 - DNA, 21 bp, Artificial Sequence
  source: /note="Description of Artificial Sequence: Synthetic oligonucleotide"
tacgaaacagcattcagagca

SEQ ID NO: 42566 - DNA, 21 bp, Artificial Sequence
  source: /note="Description of Artificial Sequence: Synthetic oligonucleotide"
tacgaaacagacatcagccaa

SEQ ID NO: 42567 - DNA, 21 bp, Artificial Sequence
  source: /note="Description of Artificial Sequence: Synthetic oligonucleotide"
tacgaaacagaactcagagca

SEQ ID NO: 42568 - DNA, 21 bp, Artificial Sequence
  source: /note="Description of Artificial Sequence: Synthetic oligonucleotide"
tacttcgcaggaagaacagac

SEQ ID NO: 42569 - DNA, 21 bp, Artificial Sequence
  source: /note="Description of Artificial Sequence: Synthetic oligonucleotide"
tacttcgcaagcccaacaagc

SEQ ID NO: 42570 - DNA, 21 bp, Artificial Sequence
  source: /note="Description of Artificial Sequence: Synthetic oligonucleotide"
tacttcgaagcaagcagcgca

SEQ ID NO: 42571 - DNA, 21 bp, Artificial Sequence
  source: /note="Description of Artificial Sequence: Synthetic oligonucleotide"
tacttcggaagcagcgcaaca

SEQ ID NO: 42572 - DNA, 21 bp, Artificial Sequence
  source: /note="Description of Artificial Sequence: Synthetic oligonucleotide"
tacttcggaagcagcgaccca

SEQ ID NO: 42573 - DNA, 21 bp, Artificial Sequence
  source: /note="Description of Artificial Sequence: Synthetic oligonucleotide"
tacttccacctcgcaacaagc

SEQ ID NO: 42574 - DNA, 21 bp, Artificial Sequence
  source: /note="Description of Artificial Sequence: Synthetic oligonucleotide"
tacttcccaagcatggtcgac

SEQ ID NO: 42575 - DNA, 21 bp, Artificial Sequence
  source: /note="Description of Artificial Sequence: Synthetic oligonucleotide"
tacttcagccacgacgaaaca

SEQ ID NO: 42576 - DNA, 21 bp, Artificial Sequence
  source: /note="Description of Artificial Sequence: Synthetic oligonucleotide"
tacttcacaaacgacagcgtc

SEQ ID NO: 42577 - DNA, 21 bp, Artificial Sequence
  source: /note="Description of Artificial Sequence: Synthetic oligonucleotide"
tacttcacaagcagaagcgaa

SEQ ID NO: 42578 - DNA, 21 bp, Artificial Sequence
  source: /note="Description of Artificial Sequence: Synthetic oligonucleotide"
tacttcgtcgcaaacaaccca

SEQ ID NO: 42579 - DNA, 21 bp, Artificial Sequence
  source: /note="Description of Artificial Sequence: Synthetic oligonucleotide"
tacttcgtcaaaatcctcatc

SEQ ID NO: 42580 - DNA, 21 bp, Artificial Sequence
  source: /note="Description of Artificial Sequence: Synthetic oligonucleotide"
tacggagcaagcccagacaca

SEQ ID NO: 42581 - DNA, 21 bp, Artificial Sequence
  source: /note="Description of Artificial Sequence: Synthetic oligonucleotide"
tacggagcagtcgcaaaacac

SEQ ID NO: 42582 - DNA, 21 bp, Artificial Sequence
  source: /note="Description of Artificial Sequence: Synthetic oligonucleotide"
tacggagcagtcagacacaac

SEQ ID NO: 42583 - DNA, 21 bp, Artificial Sequence
  source: /note="Description of Artificial Sequence: Synthetic oligonucleotide"
tacggagcagtcagcccagtc

SEQ ID NO: 42584 - DNA, 21 bp, Artificial Sequence
  source: /note="Description of Artificial Sequence: Synthetic oligonucleotide"
tacggagacccaggaccacca

SEQ ID NO: 42585 - DNA, 21 bp, Artificial Sequence
  source: /note="Description of Artificial Sequence: Synthetic oligonucleotide"
tacggagacgtcgcagacagc

SEQ ID NO: 42586 - DNA, 21 bp, Artificial Sequence
  source: /note="Description of Artificial Sequence: Synthetic oligonucleotide"
tacggagaaccaatcagacca

SEQ ID NO: 42587 - DNA, 21 bp, Artificial Sequence
  source: /note="Description of Artificial Sequence: Synthetic oligonucleotide"
tacggaggagcaggaagcctc

SEQ ID NO: 42588 - DNA, 21 bp, Artificial Sequence
  source: /note="Description of Artificial Sequence: Synthetic oligonucleotide"
tacggaggacacacagtcagc

SEQ ID NO: 42589 - DNA, 21 bp, Artificial Sequence
  source: /note="Description of Artificial Sequence: Synthetic oligonucleotide"
tacggaggaccaaacatgaca

SEQ ID NO: 42590 - DNA, 21 bp, Artificial Sequence
  source: /note="Description of Artificial Sequence: Synthetic oligonucleotide"
tacggaatcagcccaaaaaca

SEQ ID NO: 42591 - DNA, 21 bp, Artificial Sequence
  source: /note="Description of Artificial Sequence: Synthetic oligonucleotide"
tacggaaaaatgacaagcgac

SEQ ID NO: 42592 - DNA, 21 bp, Artificial Sequence
  source: /note="Description of Artificial Sequence: Synthetic oligonucleotide"
tacggactcaaaagcgcaatc

SEQ ID NO: 42593 - DNA, 21 bp, Artificial Sequence
  source: /note="Description of Artificial Sequence: Synthetic oligonucleotide"
tacggactcagcgcacacagc

SEQ ID NO: 42594 - DNA, 21 bp, Artificial Sequence
  source: /note="Description of Artificial Sequence: Synthetic oligonucleotide"
tacggaatgaaagtcgcacaa

SEQ ID NO: 42595 - DNA, 21 bp, Artificial Sequence
  source: /note="Description of Artificial Sequence: Synthetic oligonucleotide"
tacggaatgagcttcaaagaa

SEQ ID NO: 42596 - DNA, 21 bp, Artificial Sequence
  source: /note="Description of Artificial Sequence: Synthetic oligonucleotide"
tacggaaacgcaagagcagtc

SEQ ID NO: 42597 - DNA, 21 bp, Artificial Sequence
  source: /note="Description of Artificial Sequence: Synthetic oligonucleotide"
tacggaaacggaagcctcgga

SEQ ID NO: 42598 - DNA, 21 bp, Artificial Sequence
  source: /note="Description of Artificial Sequence: Synthetic oligonucleotide"
tacggaaaccacctcctcagc

SEQ ID NO: 42599 - DNA, 21 bp, Artificial Sequence
  source: /note="Description of Artificial Sequence: Synthetic oligonucleotide"
tacggaccagcactcctcagc

SEQ ID NO: 42600 - DNA, 21 bp, Artificial Sequence
  source: /note="Description of Artificial Sequence: Synthetic oligonucleotide"
tacggaccagacctcagacaa

SEQ ID NO: 42601 - DNA, 21 bp, Artificial Sequence
  source: /note="Description of Artificial Sequence: Synthetic oligonucleotide"
tacggaccacacgcaaaaagc

SEQ ID NO: 42602 - DNA, 21 bp, Artificial Sequence
  source: /note="Description of Artificial Sequence: Synthetic oligonucleotide"
tacggacaaagcggagcaagc

SEQ ID NO: 42603 - DNA, 21 bp, Artificial Sequence
  source: /note="Description of Artificial Sequence: Synthetic oligonucleotide"
tacggacaaagcaaaagcagc

SEQ ID NO: 42604 - DNA, 21 bp, Artificial Sequence
  source: /note="Description of Artificial Sequence: Synthetic oligonucleotide"
tacggaagaaacatgacacaa

SEQ ID NO: 42605 - DNA, 21 bp, Artificial Sequence
  source: /note="Description of Artificial Sequence: Synthetic oligonucleotide"
tacggaagaagccaaagcctc

SEQ ID NO: 42606 - DNA, 21 bp, Artificial Sequence
  source: /note="Description of Artificial Sequence: Synthetic oligonucleotide"
tacggaagcctcaacatcgca

SEQ ID NO: 42607 - DNA, 21 bp, Artificial Sequence
  source: /note="Description of Artificial Sequence: Synthetic oligonucleotide"
tacggaagcccaagagtcaca

SEQ ID NO: 42608 - DNA, 21 bp, Artificial Sequence
  source: /note="Description of Artificial Sequence: Synthetic oligonucleotide"
tacggaagcagctgccacaca

SEQ ID NO: 42609 - DNA, 21 bp, Artificial Sequence
  source: /note="Description of Artificial Sequence: Synthetic oligonucleotide"
tacggaagcagcagaacaaca

SEQ ID NO: 42610 - DNA, 21 bp, Artificial Sequence
  source: /note="Description of Artificial Sequence: Synthetic oligonucleotide"
tacggaacagcaacacaagca

SEQ ID NO: 42611 - DNA, 21 bp, Artificial Sequence
  source: /note="Description of Artificial Sequence: Synthetic oligonucleotide"
tacggaacagaaacaaactac

SEQ ID NO: 42612 - DNA, 21 bp, Artificial Sequence
  source: /note="Description of Artificial Sequence: Synthetic oligonucleotide"
tacggaacaggaggacacctc

SEQ ID NO: 42613 - DNA, 21 bp, Artificial Sequence
  source: /note="Description of Artificial Sequence: Synthetic oligonucleotide"
tacggaacactcgcaagacac

SEQ ID NO: 42614 - DNA, 21 bp, Artificial Sequence
  source: /note="Description of Artificial Sequence: Synthetic oligonucleotide"
tacggagtcagaccaagcaca

SEQ ID NO: 42615 - DNA, 21 bp, Artificial Sequence
  source: /note="Description of Artificial Sequence: Synthetic oligonucleotide"
tacggatacgcagcactcaac

SEQ ID NO: 42616 - DNA, 21 bp, Artificial Sequence
  source: /note="Description of Artificial Sequence: Synthetic oligonucleotide"
taccacgcaggaccaccagac

SEQ ID NO: 42617 - DNA, 21 bp, Artificial Sequence
  source: /note="Description of Artificial Sequence: Synthetic oligonucleotide"
taccacggaagaacagtcgtc

SEQ ID NO: 42618 - DNA, 21 bp, Artificial Sequence
  source: /note="Description of Artificial Sequence: Synthetic oligonucleotide"
taccacaaaacaggagtccac

SEQ ID NO: 42619 - DNA, 21 bp, Artificial Sequence
  source: /note="Description of Artificial Sequence: Synthetic oligonucleotide"
taccacatgacagtcaaaagc

SEQ ID NO: 42620 - DNA, 21 bp, Artificial Sequence
  source: /note="Description of Artificial Sequence: Synthetic oligonucleotide"
taccacaaccacggaacaagc

SEQ ID NO: 42621 - DNA, 21 bp, Artificial Sequence
  source: /note="Description of Artificial Sequence: Synthetic oligonucleotide"
taccacaacctccaaggaatg

SEQ ID NO: 42622 - DNA, 21 bp, Artificial Sequence
  source: /note="Description of Artificial Sequence: Synthetic oligonucleotide"
taccacaacaacagcagccca

SEQ ID NO: 42623 - DNA, 21 bp, Artificial Sequence
  source: /note="Description of Artificial Sequence: Synthetic oligonucleotide"
taccacccaccaagagaaaac

SEQ ID NO: 42624 - DNA, 21 bp, Artificial Sequence
  source: /note="Description of Artificial Sequence: Synthetic oligonucleotide"
taccacccagtcatcgcacca

SEQ ID NO: 42625 - DNA, 21 bp, Artificial Sequence
  source: /note="Description of Artificial Sequence: Synthetic oligonucleotide"
taccacagcgaagtcagagca

SEQ ID NO: 42626 - DNA, 21 bp, Artificial Sequence
  source: /note="Description of Artificial Sequence: Synthetic oligonucleotide"
taccacagcaacacaacaagc

SEQ ID NO: 42627 - DNA, 21 bp, Artificial Sequence
  source: /note="Description of Artificial Sequence: Synthetic oligonucleotide"
taccacagcgtcagcacaagc

SEQ ID NO: 42628 - DNA, 21 bp, Artificial Sequence
  source: /note="Description of Artificial Sequence: Synthetic oligonucleotide"
taccacacagcaagcatgaac

SEQ ID NO: 42629 - DNA, 21 bp, Artificial Sequence
  source: /note="Description of Artificial Sequence: Synthetic oligonucleotide"
taccacacactcaacaaagac

SEQ ID NO: 42630 - DNA, 21 bp, Artificial Sequence
  source: /note="Description of Artificial Sequence: Synthetic oligonucleotide"
taccacacagtcagcagcaac

SEQ ID NO: 42631 - DNA, 21 bp, Artificial Sequence
  source: /note="Description of Artificial Sequence: Synthetic oligonucleotide"
taccacgtcagagcagcaagc

SEQ ID NO: 42632 - DNA, 21 bp, Artificial Sequence
  source: /note="Description of Artificial Sequence: Synthetic oligonucleotide"
tacatcgaaacaagagtcaca

SEQ ID NO: 42633 - DNA, 21 bp, Artificial Sequence
  source: /note="Description of Artificial Sequence: Synthetic oligonucleotide"
tacatcggagaaagagaccca

SEQ ID NO: 42634 - DNA, 21 bp, Artificial Sequence
  source: /note="Description of Artificial Sequence: Synthetic oligonucleotide"
tacatcggaccagacctcgca

SEQ ID NO: 42635 - DNA, 21 bp, Artificial Sequence
  source: /note="Description of Artificial Sequence: Synthetic oligonucleotide"
tacatccacccagaacaagaa

SEQ ID NO: 42636 - DNA, 21 bp, Artificial Sequence
  source: /note="Description of Artificial Sequence: Synthetic oligonucleotide"
tacatcatcgcacaagaatgc

SEQ ID NO: 42637 - DNA, 21 bp, Artificial Sequence
  source: /note="Description of Artificial Sequence: Synthetic oligonucleotide"
tacatcctcacaagcgaaaca

SEQ ID NO: 42638 - DNA, 21 bp, Artificial Sequence
  source: /note="Description of Artificial Sequence: Synthetic oligonucleotide"
tacatcaacgcactcatcgca

SEQ ID NO: 42639 - DNA, 21 bp, Artificial Sequence
  source: /note="Description of Artificial Sequence: Synthetic oligonucleotide"
tacatcccaagcaaattcaca

SEQ ID NO: 42640 - DNA, 21 bp, Artificial Sequence
  source: /note="Description of Artificial Sequence: Synthetic oligonucleotide"
tacatccaagtcccaaaagga

SEQ ID NO: 42641 - DNA, 21 bp, Artificial Sequence
  source: /note="Description of Artificial Sequence: Synthetic oligonucleotide"
tacatcagcgcaggaacaagc

SEQ ID NO: 42642 - DNA, 21 bp, Artificial Sequence
  source: /note="Description of Artificial Sequence: Synthetic oligonucleotide"
tacatcagcccagtcagcgtc

SEQ ID NO: 42643 - DNA, 21 bp, Artificial Sequence
  source: /note="Description of Artificial Sequence: Synthetic oligonucleotide"
tacaaagcagcaagcgtccca

SEQ ID NO: 42644 - DNA, 21 bp, Artificial Sequence
  source: /note="Description of Artificial Sequence: Synthetic oligonucleotide"
tacaaaggagcaccagtcaca

SEQ ID NO: 42645 - DNA, 21 bp, Artificial Sequence
  source: /note="Description of Artificial Sequence: Synthetic oligonucleotide"
tacaaaggagcaagcctcgac

SEQ ID NO: 42646 - DNA, 21 bp, Artificial Sequence
  source: /note="Description of Artificial Sequence: Synthetic oligonucleotide"
tacaaaggaggaaacagcttc

SEQ ID NO: 42647 - DNA, 21 bp, Artificial Sequence
  source: /note="Description of Artificial Sequence: Synthetic oligonucleotide"
tacaaactcaacgcaacatac

SEQ ID NO: 42648 - DNA, 21 bp, Artificial Sequence
  source: /note="Description of Artificial Sequence: Synthetic oligonucleotide"
tacaaactccaacaagtcagc

SEQ ID NO: 42649 - DNA, 21 bp, Artificial Sequence
  source: /note="Description of Artificial Sequence: Synthetic oligonucleotide"
tacaaaccagcaaacgtcaac

SEQ ID NO: 42650 - DNA, 21 bp, Artificial Sequence
  source: /note="Description of Artificial Sequence: Synthetic oligonucleotide"
tacaaaccaagcgaaggaaca

SEQ ID NO: 42651 - DNA, 21 bp, Artificial Sequence
  source: /note="Description of Artificial Sequence: Synthetic oligonucleotide"
tacaaacaacacgtcatcagc

SEQ ID NO: 42652 - DNA, 21 bp, Artificial Sequence
  source: /note="Description of Artificial Sequence: Synthetic oligonucleotide"
tacaaaagcagcgcaggaagc

SEQ ID NO: 42653 - DNA, 21 bp, Artificial Sequence
  source: /note="Description of Artificial Sequence: Synthetic oligonucleotide"
tacaaaacaggaagactcgca

SEQ ID NO: 42654 - DNA, 21 bp, Artificial Sequence
  source: /note="Description of Artificial Sequence: Synthetic oligonucleotide"
tacaaagtcctcccaagcgca

SEQ ID NO: 42655 - DNA, 21 bp, Artificial Sequence
  source: /note="Description of Artificial Sequence: Synthetic oligonucleotide"
tacctcgcaggagaaagaaca

SEQ ID NO: 42656 - DNA, 21 bp, Artificial Sequence
  source: /note="Description of Artificial Sequence: Synthetic oligonucleotide"
tacctcgcacacggactccaa

SEQ ID NO: 42657 - DNA, 21 bp, Artificial Sequence
  source: /note="Description of Artificial Sequence: Synthetic oligonucleotide"
tacctcgcactccaatacaaa

SEQ ID NO: 42658 - DNA, 21 bp, Artificial Sequence
  source: /note="Description of Artificial Sequence: Synthetic oligonucleotide"
tacctcgaccacatctgggaa

SEQ ID NO: 42659 - DNA, 21 bp, Artificial Sequence
  source: /note="Description of Artificial Sequence: Synthetic oligonucleotide"
tacctcgacacaagcccagtc

SEQ ID NO: 42660 - DNA, 21 bp, Artificial Sequence
  source: /note="Description of Artificial Sequence: Synthetic oligonucleotide"
tacctcgaaagatacggaagc

SEQ ID NO: 42661 - DNA, 21 bp, Artificial Sequence
  source: /note="Description of Artificial Sequence: Synthetic oligonucleotide"
tacctcggagacaaaatggca

SEQ ID NO: 42662 - DNA, 21 bp, Artificial Sequence
  source: /note="Description of Artificial Sequence: Synthetic oligonucleotide"
tacctcggacacagcacaaaa

SEQ ID NO: 42663 - DNA, 21 bp, Artificial Sequence
  source: /note="Description of Artificial Sequence: Synthetic oligonucleotide"
tacctcggaacacaagtcaac

SEQ ID NO: 42664 - DNA, 21 bp, Artificial Sequence
  source: /note="Description of Artificial Sequence: Synthetic oligonucleotide"
tacctcaaattcacagacagc

SEQ ID NO: 42665 - DNA, 21 bp, Artificial Sequence
  source: /note="Description of Artificial Sequence: Synthetic oligonucleotide"
tacctcaaaagcaacagccca

SEQ ID NO: 42666 - DNA, 21 bp, Artificial Sequence
  source: /note="Description of Artificial Sequence: Synthetic oligonucleotide"
tacctcctcagcgaactcagc

SEQ ID NO: 42667 - DNA, 21 bp, Artificial Sequence
  source: /note="Description of Artificial Sequence: Synthetic oligonucleotide"
tacctcctcagccacgcagga

SEQ ID NO: 42668 - DNA, 21 bp, Artificial Sequence
  source: /note="Description of Artificial Sequence: Synthetic oligonucleotide"
tacctcatgcacgcaagcgca

SEQ ID NO: 42669 - DNA, 21 bp, Artificial Sequence
  source: /note="Description of Artificial Sequence: Synthetic oligonucleotide"
tacctcaacgtcacaccagca

SEQ ID NO: 42670 - DNA, 21 bp, Artificial Sequence
  source: /note="Description of Artificial Sequence: Synthetic oligonucleotide"
tacctcccaaaaagcaacttc

SEQ ID NO: 42671 - DNA, 21 bp, Artificial Sequence
  source: /note="Description of Artificial Sequence: Synthetic oligonucleotide"
tacctcccactcacagcagtc

SEQ ID NO: 42672 - DNA, 21 bp, Artificial Sequence
  source: /note="Description of Artificial Sequence: Synthetic oligonucleotide"
tacctcccaagaggaacattc

SEQ ID NO: 42673 - DNA, 21 bp, Artificial Sequence
  source: /note="Description of Artificial Sequence: Synthetic oligonucleotide"
tacctcccaagaggaacaagc

SEQ ID NO: 42674 - DNA, 21 bp, Artificial Sequence
  source: /note="Description of Artificial Sequence: Synthetic oligonucleotide"
tacctcccaacaagacacgaa

SEQ ID NO: 42675 - DNA, 21 bp, Artificial Sequence
  source: /note="Description of Artificial Sequence: Synthetic oligonucleotide"
tacctccaagcacactacaac

SEQ ID NO: 42676 - DNA, 21 bp, Artificial Sequence
  source: /note="Description of Artificial Sequence: Synthetic oligonucleotide"
tacctccaacacggacacaca

SEQ ID NO: 42677 - DNA, 21 bp, Artificial Sequence
  source: /note="Description of Artificial Sequence: Synthetic oligonucleotide"
tacctccaaacagaagaccca

SEQ ID NO: 42678 - DNA, 21 bp, Artificial Sequence
  source: /note="Description of Artificial Sequence: Synthetic oligonucleotide"
tacctcagactccaaacagga

SEQ ID NO: 42679 - DNA, 21 bp, Artificial Sequence
  source: /note="Description of Artificial Sequence: Synthetic oligonucleotide"
tacctcagaccacaaagcgga

SEQ ID NO: 42680 - DNA, 21 bp, Artificial Sequence
  source: /note="Description of Artificial Sequence: Synthetic oligonucleotide"
tacctcagcgacccaagaatg

SEQ ID NO: 42681 - DNA, 21 bp, Artificial Sequence
  source: /note="Description of Artificial Sequence: Synthetic oligonucleotide"
tacctcagcggaatgatcaaa

SEQ ID NO: 42682 - DNA, 21 bp, Artificial Sequence
  source: /note="Description of Artificial Sequence: Synthetic oligonucleotide"
tacctcagccacagaagcgaa

SEQ ID NO: 42683 - DNA, 21 bp, Artificial Sequence
  source: /note="Description of Artificial Sequence: Synthetic oligonucleotide"
tacctcagcaacacagaaatg

SEQ ID NO: 42684 - DNA, 21 bp, Artificial Sequence
  source: /note="Description of Artificial Sequence: Synthetic oligonucleotide"
tacctcagcgtcgacgaaagc

SEQ ID NO: 42685 - DNA, 21 bp, Artificial Sequence
  source: /note="Description of Artificial Sequence: Synthetic oligonucleotide"
tacctcagcgtccaaagcaac

SEQ ID NO: 42686 - DNA, 21 bp, Artificial Sequence
  source: /note="Description of Artificial Sequence: Synthetic oligonucleotide"
tacctcacaaaacacacaagc

SEQ ID NO: 42687 - DNA, 21 bp, Artificial Sequence
  source: /note="Description of Artificial Sequence: Synthetic oligonucleotide"
tacctcacacaactcagcaca

SEQ ID NO: 42688 - DNA, 21 bp, Artificial Sequence
  source: /note="Description of Artificial Sequence: Synthetic oligonucleotide"
tacctcgtcgaaacaacaaaa

SEQ ID NO: 42689 - DNA, 21 bp, Artificial Sequence
  source: /note="Description of Artificial Sequence: Synthetic oligonucleotide"
tacctcgtcggacaaagagtc

SEQ ID NO: 42690 - DNA, 21 bp, Artificial Sequence
  source: /note="Description of Artificial Sequence: Synthetic oligonucleotide"
tacatggacacagacgacaga

SEQ ID NO: 42691 - DNA, 21 bp, Artificial Sequence
  source: /note="Description of Artificial Sequence: Synthetic oligonucleotide"
tacatgggacacgcactcagc

SEQ ID NO: 42692 - DNA, 21 bp, Artificial Sequence
  source: /note="Description of Artificial Sequence: Synthetic oligonucleotide"
tacatgcacgcaagcaacgtc

SEQ ID NO: 42693 - DNA, 21 bp, Artificial Sequence
  source: /note="Description of Artificial Sequence: Synthetic oligonucleotide"
tacatgcacggaagccacgca

SEQ ID NO: 42694 - DNA, 21 bp, Artificial Sequence
  source: /note="Description of Artificial Sequence: Synthetic oligonucleotide"
tacatgcacagcccaacacca

SEQ ID NO: 42695 - DNA, 21 bp, Artificial Sequence
  source: /note="Description of Artificial Sequence: Synthetic oligonucleotide"
tacatgcacagcagcagaaca

SEQ ID NO: 42696 - DNA, 21 bp, Artificial Sequence
  source: /note="Description of Artificial Sequence: Synthetic oligonucleotide"
tacatgcactacacagtcaca

SEQ ID NO: 42697 - DNA, 21 bp, Artificial Sequence
  source: /note="Description of Artificial Sequence: Synthetic oligonucleotide"
tacatgccagcaccagtccaa

SEQ ID NO: 42698 - DNA, 21 bp, Artificial Sequence
  source: /note="Description of Artificial Sequence: Synthetic oligonucleotide"
tacatgcaaacaagagacaca

SEQ ID NO: 42699 - DNA, 21 bp, Artificial Sequence
  source: /note="Description of Artificial Sequence: Synthetic oligonucleotide"
tacatgcaagtcttcagccca

SEQ ID NO: 42700 - DNA, 21 bp, Artificial Sequence
  source: /note="Description of Artificial Sequence: Synthetic oligonucleotide"
tacatgagcgcaatcagaatg

SEQ ID NO: 42701 - DNA, 21 bp, Artificial Sequence
  source: /note="Description of Artificial Sequence: Synthetic oligonucleotide"
tacatgagcgcaacaacaaga

SEQ ID NO: 42702 - DNA, 21 bp, Artificial Sequence
  source: /note="Description of Artificial Sequence: Synthetic oligonucleotide"
tacatgagcagaacagcaagc

SEQ ID NO: 42703 - DNA, 21 bp, Artificial Sequence
  source: /note="Description of Artificial Sequence: Synthetic oligonucleotide"
tacatgagcgtcacacaacaa

SEQ ID NO: 42704 - DNA, 21 bp, Artificial Sequence
  source: /note="Description of Artificial Sequence: Synthetic oligonucleotide"
tacatgacaggaagaccacac

SEQ ID NO: 42705 - DNA, 21 bp, Artificial Sequence
  source: /note="Description of Artificial Sequence: Synthetic oligonucleotide"
tacatgacaaaaaacttcgga

SEQ ID NO: 42706 - DNA, 21 bp, Artificial Sequence
  source: /note="Description of Artificial Sequence: Synthetic oligonucleotide"
tacatgacaaacctccaacca

SEQ ID NO: 42707 - DNA, 21 bp, Artificial Sequence
  source: /note="Description of Artificial Sequence: Synthetic oligonucleotide"
tacatgacaagccaaagcaga

SEQ ID NO: 42708 - DNA, 21 bp, Artificial Sequence
  source: /note="Description of Artificial Sequence: Synthetic oligonucleotide"
tacatgtacgacggaagcgtc

SEQ ID NO: 42709 - DNA, 21 bp, Artificial Sequence
  source: /note="Description of Artificial Sequence: Synthetic oligonucleotide"
tacaacgcagcaagcggactc

SEQ ID NO: 42710 - DNA, 21 bp, Artificial Sequence
  source: /note="Description of Artificial Sequence: Synthetic oligonucleotide"
tacaacgcaggaggaccaaga

SEQ ID NO: 42711 - DNA, 21 bp, Artificial Sequence
  source: /note="Description of Artificial Sequence: Synthetic oligonucleotide"
tacaacgcactcctccaacca

SEQ ID NO: 42712 - DNA, 21 bp, Artificial Sequence
  source: /note="Description of Artificial Sequence: Synthetic oligonucleotide"
tacaacgacgtcatgagcaac

SEQ ID NO: 42713 - DNA, 21 bp, Artificial Sequence
  source: /note="Description of Artificial Sequence: Synthetic oligonucleotide"
tacaacggaaacctcagactc

SEQ ID NO: 42714 - DNA, 21 bp, Artificial Sequence
  source: /note="Description of Artificial Sequence: Synthetic oligonucleotide"
tacaacggacaacacatcgca

SEQ ID NO: 42715 - DNA, 21 bp, Artificial Sequence
  source: /note="Description of Artificial Sequence: Synthetic oligonucleotide"
tacaacatcggaacaagcaac

SEQ ID NO: 42716 - DNA, 21 bp, Artificial Sequence
  source: /note="Description of Artificial Sequence: Synthetic oligonucleotide"
tacaacatcaaccaactcaca

SEQ ID NO: 42717 - DNA, 21 bp, Artificial Sequence
  source: /note="Description of Artificial Sequence: Synthetic oligonucleotide"
tacaacctcagaccactccaa

SEQ ID NO: 42718 - DNA, 21 bp, Artificial Sequence
  source: /note="Description of Artificial Sequence: Synthetic oligonucleotide"
tacaacctcagcggaccaagc

SEQ ID NO: 42719 - DNA, 21 bp, Artificial Sequence
  source: /note="Description of Artificial Sequence: Synthetic oligonucleotide"
tacaacctcagcaacccagca

SEQ ID NO: 42720 - DNA, 21 bp, Artificial Sequence
  source: /note="Description of Artificial Sequence: Synthetic oligonucleotide"
tacaacctcagcgtcggattc

SEQ ID NO: 42721 - DNA, 21 bp, Artificial Sequence
  source: /note="Description of Artificial Sequence: Synthetic oligonucleotide"
tacaacaacagcaacacaaca

SEQ ID NO: 42722 - DNA, 21 bp, Artificial Sequence
  source: /note="Description of Artificial Sequence: Synthetic oligonucleotide"
tacaacccactcaaccaaaga

SEQ ID NO: 42723 - DNA, 21 bp, Artificial Sequence
  source: /note="Description of Artificial Sequence: Synthetic oligonucleotide"
tacaacccaccagaaccactc

SEQ ID NO: 42724 - DNA, 21 bp, Artificial Sequence
  source: /note="Description of Artificial Sequence: Synthetic oligonucleotide"
tacaacccaccaagaagcagc

SEQ ID NO: 42725 - DNA, 21 bp, Artificial Sequence
  source: /note="Description of Artificial Sequence: Synthetic oligonucleotide"
tacaaccaacacggaccacca

SEQ ID NO: 42726 - DNA, 21 bp, Artificial Sequence
  source: /note="Description of Artificial Sequence: Synthetic oligonucleotide"
tacaaccaactcgcaagacca

SEQ ID NO: 42727 - DNA, 21 bp, Artificial Sequence
  source: /note="Description of Artificial Sequence: Synthetic oligonucleotide"
tacaaccaaagaccaatcgtc

SEQ ID NO: 42728 - DNA, 21 bp, Artificial Sequence
  source: /note="Description of Artificial Sequence: Synthetic oligonucleotide"
tacaacagagcaaacctcagc

SEQ ID NO: 42729 - DNA, 21 bp, Artificial Sequence
  source: /note="Description of Artificial Sequence: Synthetic oligonucleotide"
tacaacagaggacaaatgcaa

SEQ ID NO: 42730 - DNA, 21 bp, Artificial Sequence
  source: /note="Description of Artificial Sequence: Synthetic oligonucleotide"
tacaacagagtcgcaacaagc

SEQ ID NO: 42731 - DNA, 21 bp, Artificial Sequence
  source: /note="Description of Artificial Sequence: Synthetic oligonucleotide"
tacaacagcagcggagtccca

SEQ ID NO: 42732 - DNA, 21 bp, Artificial Sequence
  source: /note="Description of Artificial Sequence: Synthetic oligonucleotide"
tacaacagcagcagcctcgga

SEQ ID NO: 42733 - DNA, 21 bp, Artificial Sequence
  source: /note="Description of Artificial Sequence: Synthetic oligonucleotide"
tacaacagcacaggactcaga

SEQ ID NO: 42734 - DNA, 21 bp, Artificial Sequence
  source: /note="Description of Artificial Sequence: Synthetic oligonucleotide"
tacaacacaggaagaatcaca

SEQ ID NO: 42735 - DNA, 21 bp, Artificial Sequence
  source: /note="Description of Artificial Sequence: Synthetic oligonucleotide"
tacaacacaatcaaagcagtc

SEQ ID NO: 42736 - DNA, 21 bp, Artificial Sequence
  source: /note="Description of Artificial Sequence: Synthetic oligonucleotide"
tacaacacaccaagaatggaa

SEQ ID NO: 42737 - DNA, 21 bp, Artificial Sequence
  source: /note="Description of Artificial Sequence: Synthetic oligonucleotide"
tacaacgtcgaaacagacaac

SEQ ID NO: 42738 - DNA, 21 bp, Artificial Sequence
  source: /note="Description of Artificial Sequence: Synthetic oligonucleotide"
tacaacgtctacacagtccca

SEQ ID NO: 42739 - DNA, 21 bp, Artificial Sequence
  source: /note="Description of Artificial Sequence: Synthetic oligonucleotide"
tacccagcactcgacgtcttc

SEQ ID NO: 42740 - DNA, 21 bp, Artificial Sequence
  source: /note="Description of Artificial Sequence: Synthetic oligonucleotide"
tacccagcaaacagactcctc

SEQ ID NO: 42741 - DNA, 21 bp, Artificial Sequence
  source: /note="Description of Artificial Sequence: Synthetic oligonucleotide"
tacccagacagcgacctcctc

SEQ ID NO: 42742 - DNA, 21 bp, Artificial Sequence
  source: /note="Description of Artificial Sequence: Synthetic oligonucleotide"
tacccattcggagacatggca

SEQ ID NO: 42743 - DNA, 21 bp, Artificial Sequence
  source: /note="Description of Artificial Sequence: Synthetic oligonucleotide"
tacccaggagcaacagaaaca

SEQ ID NO: 42744 - DNA, 21 bp, Artificial Sequence
  source: /note="Description of Artificial Sequence: Synthetic oligonucleotide"
tacccaggaacaaaacaaatg

SEQ ID NO: 42745 - DNA, 21 bp, Artificial Sequence
  source: /note="Description of Artificial Sequence: Synthetic oligonucleotide"
tacccaggagtcacagtcaaa

SEQ ID NO: 42746 - DNA, 21 bp, Artificial Sequence
  source: /note="Description of Artificial Sequence: Synthetic oligonucleotide"
tacccacacgcagcaagctgg

SEQ ID NO: 42747 - DNA, 21 bp, Artificial Sequence
  source: /note="Description of Artificial Sequence: Synthetic oligonucleotide"
tacccacaccacagccaacac

SEQ ID NO: 42748 - DNA, 21 bp, Artificial Sequence
  source: /note="Description of Artificial Sequence: Synthetic oligonucleotide"
tacccacacacaccagcagca

SEQ ID NO: 42749 - DNA, 21 bp, Artificial Sequence
  source: /note="Description of Artificial Sequence: Synthetic oligonucleotide"
tacccaatcgcaacagtcaga

SEQ ID NO: 42750 - DNA, 21 bp, Artificial Sequence
  source: /note="Description of Artificial Sequence: Synthetic oligonucleotide"
tacccaatcagaccactcgga

SEQ ID NO: 42751 - DNA, 21 bp, Artificial Sequence
  source: /note="Description of Artificial Sequence: Synthetic oligonucleotide"
tacccaaaagtcccaacattc

SEQ ID NO: 42752 - DNA, 21 bp, Artificial Sequence
  source: /note="Description of Artificial Sequence: Synthetic oligonucleotide"
tacccaaaagtctacagcgca

SEQ ID NO: 42753 - DNA, 21 bp, Artificial Sequence
  source: /note="Description of Artificial Sequence: Synthetic oligonucleotide"
tacccactcagcacaagcgca

SEQ ID NO: 42754 - DNA, 21 bp, Artificial Sequence
  source: /note="Description of Artificial Sequence: Synthetic oligonucleotide"
tacccaatgccaagcccacca

SEQ ID NO: 42755 - DNA, 21 bp, Artificial Sequence
  source: /note="Description of Artificial Sequence: Synthetic oligonucleotide"
tacccaaacgacagctacgca

SEQ ID NO: 42756 - DNA, 21 bp, Artificial Sequence
  source: /note="Description of Artificial Sequence: Synthetic oligonucleotide"
tacccaaaccacagcagaaac

SEQ ID NO: 42757 - DNA, 21 bp, Artificial Sequence
  source: /note="Description of Artificial Sequence: Synthetic oligonucleotide"
tacccaaacagcctcagcctc

SEQ ID NO: 42758 - DNA, 21 bp, Artificial Sequence
  source: /note="Description of Artificial Sequence: Synthetic oligonucleotide"
tacccaccagacagccaccca

SEQ ID NO: 42759 - DNA, 21 bp, Artificial Sequence
  source: /note="Description of Artificial Sequence: Synthetic oligonucleotide"
tacccaccaatcgcacaagga

SEQ ID NO: 42760 - DNA, 21 bp, Artificial Sequence
  source: /note="Description of Artificial Sequence: Synthetic oligonucleotide"
tacccaccaaaactcggaagc

SEQ ID NO: 42761 - DNA, 21 bp, Artificial Sequence
  source: /note="Description of Artificial Sequence: Synthetic oligonucleotide"
tacccaccaaaatacgcaaac

SEQ ID NO: 42762 - DNA, 21 bp, Artificial Sequence
  source: /note="Description of Artificial Sequence: Synthetic oligonucleotide"
tacccaccaccaaaagcaagc

SEQ ID NO: 42763 - DNA, 21 bp, Artificial Sequence
  source: /note="Description of Artificial Sequence: Synthetic oligonucleotide"
tacccaccaagcggatacaac

SEQ ID NO: 42764 - DNA, 21 bp, Artificial Sequence
  source: /note="Description of Artificial Sequence: Synthetic oligonucleotide"
tacccaccaacagcaagagca

SEQ ID NO: 42765 - DNA, 21 bp, Artificial Sequence
  source: /note="Description of Artificial Sequence: Synthetic oligonucleotide"
tacccaccaacaccactccca

SEQ ID NO: 42766 - DNA, 21 bp, Artificial Sequence
  source: /note="Description of Artificial Sequence: Synthetic oligonucleotide"
tacccaccatggcacaaccca

SEQ ID NO: 42767 - DNA, 21 bp, Artificial Sequence
  source: /note="Description of Artificial Sequence: Synthetic oligonucleotide"
tacccaagagacgcaagcagc

SEQ ID NO: 42768 - DNA, 21 bp, Artificial Sequence
  source: /note="Description of Artificial Sequence: Synthetic oligonucleotide"
tacccaagagaaaaaagcctc

SEQ ID NO: 42769 - DNA, 21 bp, Artificial Sequence
  source: /note="Description of Artificial Sequence: Synthetic oligonucleotide"
tacccaagacacccaagcttc

SEQ ID NO: 42770 - DNA, 21 bp, Artificial Sequence
  source: /note="Description of Artificial Sequence: Synthetic oligonucleotide"
tacccaagaacactcccagaa

SEQ ID NO: 42771 - DNA, 21 bp, Artificial Sequence
  source: /note="Description of Artificial Sequence: Synthetic oligonucleotide"
tacccaagcgcaagcagcatg

SEQ ID NO: 42772 - DNA, 21 bp, Artificial Sequence
  source: /note="Description of Artificial Sequence: Synthetic oligonucleotide"
tacccaagccacctcctcaac

SEQ ID NO: 42773 - DNA, 21 bp, Artificial Sequence
  source: /note="Description of Artificial Sequence: Synthetic oligonucleotide"
tacccaagcccagcaggagaa

SEQ ID NO: 42774 - DNA, 21 bp, Artificial Sequence
  source: /note="Description of Artificial Sequence: Synthetic oligonucleotide"
tacccaagcccaagcaacctc

SEQ ID NO: 42775 - DNA, 21 bp, Artificial Sequence
  source: /note="Description of Artificial Sequence: Synthetic oligonucleotide"
tacccaagcagcagcatgcca

SEQ ID NO: 42776 - DNA, 21 bp, Artificial Sequence
  source: /note="Description of Artificial Sequence: Synthetic oligonucleotide"
tacccaacaggagaaacacca

SEQ ID NO: 42777 - DNA, 21 bp, Artificial Sequence
  source: /note="Description of Artificial Sequence: Synthetic oligonucleotide"
tacccaacacacagccacatg

SEQ ID NO: 42778 - DNA, 21 bp, Artificial Sequence
  source: /note="Description of Artificial Sequence: Synthetic oligonucleotide"
tacccaacaaaacacctccac

SEQ ID NO: 42779 - DNA, 21 bp, Artificial Sequence
  source: /note="Description of Artificial Sequence: Synthetic oligonucleotide"
tacccaacaacaccactcatg

SEQ ID NO: 42780 - DNA, 21 bp, Artificial Sequence
  source: /note="Description of Artificial Sequence: Synthetic oligonucleotide"
tacccagtcaacgcaccaaca

SEQ ID NO: 42781 - DNA, 21 bp, Artificial Sequence
  source: /note="Description of Artificial Sequence: Synthetic oligonucleotide"
tacccagtccaagacgcactc

SEQ ID NO: 42782 - DNA, 21 bp, Artificial Sequence
  source: /note="Description of Artificial Sequence: Synthetic oligonucleotide"
tacccagtcagcacaacacaa

SEQ ID NO: 42783 - DNA, 21 bp, Artificial Sequence
  source: /note="Description of Artificial Sequence: Synthetic oligonucleotide"
taccaaggaatcgcactcgga

SEQ ID NO: 42784 - DNA, 21 bp, Artificial Sequence
  source: /note="Description of Artificial Sequence: Synthetic oligonucleotide"
taccaaggaacactcccaagc

SEQ ID NO: 42785 - DNA, 21 bp, Artificial Sequence
  source: /note="Description of Artificial Sequence: Synthetic oligonucleotide"
taccaactcgacaacacacca

SEQ ID NO: 42786 - DNA, 21 bp, Artificial Sequence
  source: /note="Description of Artificial Sequence: Synthetic oligonucleotide"
taccaactccaaagaagcgaa

SEQ ID NO: 42787 - DNA, 21 bp, Artificial Sequence
  source: /note="Description of Artificial Sequence: Synthetic oligonucleotide"
taccaactcagacaaagccca

SEQ ID NO: 42788 - DNA, 21 bp, Artificial Sequence
  source: /note="Description of Artificial Sequence: Synthetic oligonucleotide"
taccaactcgtcacacaacca

SEQ ID NO: 42789 - DNA, 21 bp, Artificial Sequence
  source: /note="Description of Artificial Sequence: Synthetic oligonucleotide"
taccaaccaccagacatggga

SEQ ID NO: 42790 - DNA, 21 bp, Artificial Sequence
  source: /note="Description of Artificial Sequence: Synthetic oligonucleotide"
taccaacaagacggaagatgc

SEQ ID NO: 42791 - DNA, 21 bp, Artificial Sequence
  source: /note="Description of Artificial Sequence: Synthetic oligonucleotide"
taccaaagagtcagcagcagc

SEQ ID NO: 42792 - DNA, 21 bp, Artificial Sequence
  source: /note="Description of Artificial Sequence: Synthetic oligonucleotide"
taccaaagcgacggaaaccca

SEQ ID NO: 42793 - DNA, 21 bp, Artificial Sequence
  source: /note="Description of Artificial Sequence: Synthetic oligonucleotide"
taccaaacagaaatcacaaga

SEQ ID NO: 42794 - DNA, 21 bp, Artificial Sequence
  source: /note="Description of Artificial Sequence: Synthetic oligonucleotide"
taccaaacatacacaagagaa

SEQ ID NO: 42795 - DNA, 21 bp, Artificial Sequence
  source: /note="Description of Artificial Sequence: Synthetic oligonucleotide"
taccaagtcaaaacaggacca

SEQ ID NO: 42796 - DNA, 21 bp, Artificial Sequence
  source: /note="Description of Artificial Sequence: Synthetic oligonucleotide"
taccaagtcaacgcaggaatg

SEQ ID NO: 42797 - DNA, 21 bp, Artificial Sequence
  source: /note="Description of Artificial Sequence: Synthetic oligonucleotide"
tacagagcagacggagaagca

SEQ ID NO: 42798 - DNA, 21 bp, Artificial Sequence
  source: /note="Description of Artificial Sequence: Synthetic oligonucleotide"
tacagagcaatggcaccacca

SEQ ID NO: 42799 - DNA, 21 bp, Artificial Sequence
  source: /note="Description of Artificial Sequence: Synthetic oligonucleotide"
tacagagcaaacagcccagtc

SEQ ID NO: 42800 - DNA, 21 bp, Artificial Sequence
  source: /note="Description of Artificial Sequence: Synthetic oligonucleotide"
tacagagcaagcggagaactc

SEQ ID NO: 42801 - DNA, 21 bp, Artificial Sequence
  source: /note="Description of Artificial Sequence: Synthetic oligonucleotide"
tacagagaccacgaagtcctc

SEQ ID NO: 42802 - DNA, 21 bp, Artificial Sequence
  source: /note="Description of Artificial Sequence: Synthetic oligonucleotide"
tacagagacatccaaagagga

SEQ ID NO: 42803 - DNA, 21 bp, Artificial Sequence
  source: /note="Description of Artificial Sequence: Synthetic oligonucleotide"
tacagagacaacagaccaaac

SEQ ID NO: 42804 - DNA, 21 bp, Artificial Sequence
  source: /note="Description of Artificial Sequence: Synthetic oligonucleotide"
tacagagacagcagcaacatc

SEQ ID NO: 42805 - DNA, 21 bp, Artificial Sequence
  source: /note="Description of Artificial Sequence: Synthetic oligonucleotide"
tacagagaaatggcaaacaga

SEQ ID NO: 42806 - DNA, 21 bp, Artificial Sequence
  source: /note="Description of Artificial Sequence: Synthetic oligonucleotide"
tacagagaaaacgcaagagca

SEQ ID NO: 42807 - DNA, 21 bp, Artificial Sequence
  source: /note="Description of Artificial Sequence: Synthetic oligonucleotide"
tacagaggaatcacactcgac

SEQ ID NO: 42808 - DNA, 21 bp, Artificial Sequence
  source: /note="Description of Artificial Sequence: Synthetic oligonucleotide"
tacagaggaaaccacgcacca

SEQ ID NO: 42809 - DNA, 21 bp, Artificial Sequence
  source: /note="Description of Artificial Sequence: Synthetic oligonucleotide"
tacagaggataccacgtcgaa

SEQ ID NO: 42810 - DNA, 21 bp, Artificial Sequence
  source: /note="Description of Artificial Sequence: Synthetic oligonucleotide"
tacagacacggaagcatcgaa

SEQ ID NO: 42811 - DNA, 21 bp, Artificial Sequence
  source: /note="Description of Artificial Sequence: Synthetic oligonucleotide"
tacagactctacgcagacgac

SEQ ID NO: 42812 - DNA, 21 bp, Artificial Sequence
  source: /note="Description of Artificial Sequence: Synthetic oligonucleotide"
tacagaatgggaacagaccaa

SEQ ID NO: 42813 - DNA, 21 bp, Artificial Sequence
  source: /note="Description of Artificial Sequence: Synthetic oligonucleotide"
tacagaccaggagcaagcgca

SEQ ID NO: 42814 - DNA, 21 bp, Artificial Sequence
  source: /note="Description of Artificial Sequence: Synthetic oligonucleotide"
tacagaccactcagcacacca

SEQ ID NO: 42815 - DNA, 21 bp, Artificial Sequence
  source: /note="Description of Artificial Sequence: Synthetic oligonucleotide"
tacagaccacaagaaaacgac

SEQ ID NO: 42816 - DNA, 21 bp, Artificial Sequence
  source: /note="Description of Artificial Sequence: Synthetic oligonucleotide"
tacagacaagcactcgaccac

SEQ ID NO: 42817 - DNA, 21 bp, Artificial Sequence
  source: /note="Description of Artificial Sequence: Synthetic oligonucleotide"
tacagacaactcgacttccca

SEQ ID NO: 42818 - DNA, 21 bp, Artificial Sequence
  source: /note="Description of Artificial Sequence: Synthetic oligonucleotide"
tacagacaaacaagagaccca

SEQ ID NO: 42819 - DNA, 21 bp, Artificial Sequence
  source: /note="Description of Artificial Sequence: Synthetic oligonucleotide"
tacagacaagtcacagaagtc

SEQ ID NO: 42820 - DNA, 21 bp, Artificial Sequence
  source: /note="Description of Artificial Sequence: Synthetic oligonucleotide"
tacagaagcgacacactcaga

SEQ ID NO: 42821 - DNA, 21 bp, Artificial Sequence
  source: /note="Description of Artificial Sequence: Synthetic oligonucleotide"
tacagaagccacacaccacca

SEQ ID NO: 42822 - DNA, 21 bp, Artificial Sequence
  source: /note="Description of Artificial Sequence: Synthetic oligonucleotide"
tacagaagcatcgtcccagac

SEQ ID NO: 42823 - DNA, 21 bp, Artificial Sequence
  source: /note="Description of Artificial Sequence: Synthetic oligonucleotide"
tacagaagcccagacgaaatg

SEQ ID NO: 42824 - DNA, 21 bp, Artificial Sequence
  source: /note="Description of Artificial Sequence: Synthetic oligonucleotide"
tacagaagcagcacaccagac

SEQ ID NO: 42825 - DNA, 21 bp, Artificial Sequence
  source: /note="Description of Artificial Sequence: Synthetic oligonucleotide"
tacagaagcgtcgtccaaagc

SEQ ID NO: 42826 - DNA, 21 bp, Artificial Sequence
  source: /note="Description of Artificial Sequence: Synthetic oligonucleotide"
tacagaacagcaacaccacca

SEQ ID NO: 42827 - DNA, 21 bp, Artificial Sequence
  source: /note="Description of Artificial Sequence: Synthetic oligonucleotide"
tacagaacagaacaactcgga

SEQ ID NO: 42828 - DNA, 21 bp, Artificial Sequence
  source: /note="Description of Artificial Sequence: Synthetic oligonucleotide"
tacagaacaatcgacagcgga

SEQ ID NO: 42829 - DNA, 21 bp, Artificial Sequence
  source: /note="Description of Artificial Sequence: Synthetic oligonucleotide"
tacagaacactcgacaaccca

SEQ ID NO: 42830 - DNA, 21 bp, Artificial Sequence
  source: /note="Description of Artificial Sequence: Synthetic oligonucleotide"
tacagaacaccagcaagcagc

SEQ ID NO: 42831 - DNA, 21 bp, Artificial Sequence
  source: /note="Description of Artificial Sequence: Synthetic oligonucleotide"
tacagaacacaaccaacacaa

SEQ ID NO: 42832 - DNA, 21 bp, Artificial Sequence
  source: /note="Description of Artificial Sequence: Synthetic oligonucleotide"
tacagagtcgacagcgcaaac

SEQ ID NO: 42833 - DNA, 21 bp, Artificial Sequence
  source: /note="Description of Artificial Sequence: Synthetic oligonucleotide"
tacagagtcagcatgctcagc

SEQ ID NO: 42834 - DNA, 21 bp, Artificial Sequence
  source: /note="Description of Artificial Sequence: Synthetic oligonucleotide"
tacagagtcagcatgagcagc

SEQ ID NO: 42835 - DNA, 21 bp, Artificial Sequence
  source: /note="Description of Artificial Sequence: Synthetic oligonucleotide"
tacagagtcgtcgtcggacca

SEQ ID NO: 42836 - DNA, 21 bp, Artificial Sequence
  source: /note="Description of Artificial Sequence: Synthetic oligonucleotide"
tacagcgcacacagcgcaaga

SEQ ID NO: 42837 - DNA, 21 bp, Artificial Sequence
  source: /note="Description of Artificial Sequence: Synthetic oligonucleotide"
tacagcgcaagcagctacctc

SEQ ID NO: 42838 - DNA, 21 bp, Artificial Sequence
  source: /note="Description of Artificial Sequence: Synthetic oligonucleotide"
tacagcgacccagcaagacca

SEQ ID NO: 42839 - DNA, 21 bp, Artificial Sequence
  source: /note="Description of Artificial Sequence: Synthetic oligonucleotide"
tacagcgacagcccaaaacaa

SEQ ID NO: 42840 - DNA, 21 bp, Artificial Sequence
  source: /note="Description of Artificial Sequence: Synthetic oligonucleotide"
tacagcgacacagacagcagc

SEQ ID NO: 42841 - DNA, 21 bp, Artificial Sequence
  source: /note="Description of Artificial Sequence: Synthetic oligonucleotide"
tacagcgactacggaagacca

SEQ ID NO: 42842 - DNA, 21 bp, Artificial Sequence
  source: /note="Description of Artificial Sequence: Synthetic oligonucleotide"
tacagcgaagcaaacatcaga

SEQ ID NO: 42843 - DNA, 21 bp, Artificial Sequence
  source: /note="Description of Artificial Sequence: Synthetic oligonucleotide"
tacagcgaattcacactcaac

SEQ ID NO: 42844 - DNA, 21 bp, Artificial Sequence
  source: /note="Description of Artificial Sequence: Synthetic oligonucleotide"
tacagcttcccaacaagcgca

SEQ ID NO: 42845 - DNA, 21 bp, Artificial Sequence
  source: /note="Description of Artificial Sequence: Synthetic oligonucleotide"
tacagcggacacgacacaagc

SEQ ID NO: 42846 - DNA, 21 bp, Artificial Sequence
  source: /note="Description of Artificial Sequence: Synthetic oligonucleotide"
tacagcggaagaatcggacca

SEQ ID NO: 42847 - DNA, 21 bp, Artificial Sequence
  source: /note="Description of Artificial Sequence: Synthetic oligonucleotide"
tacagcggaagaccagcaagc

SEQ ID NO: 42848 - DNA, 21 bp, Artificial Sequence
  source: /note="Description of Artificial Sequence: Synthetic oligonucleotide"
tacagcggaagcagcagaaac

SEQ ID NO: 42849 - DNA, 21 bp, Artificial Sequence
  source: /note="Description of Artificial Sequence: Synthetic oligonucleotide"
tacagcggaacaggattcgca

SEQ ID NO: 42850 - DNA, 21 bp, Artificial Sequence
  source: /note="Description of Artificial Sequence: Synthetic oligonucleotide"
tacagccacgcaaacctccca

SEQ ID NO: 42851 - DNA, 21 bp, Artificial Sequence
  source: /note="Description of Artificial Sequence: Synthetic oligonucleotide"
tacagccacgaagcagtcatg

SEQ ID NO: 42852 - DNA, 21 bp, Artificial Sequence
  source: /note="Description of Artificial Sequence: Synthetic oligonucleotide"
tacagccacatcgaaggaagc

SEQ ID NO: 42853 - DNA, 21 bp, Artificial Sequence
  source: /note="Description of Artificial Sequence: Synthetic oligonucleotide"
tacagccacacacaaatgagc

SEQ ID NO: 42854 - DNA, 21 bp, Artificial Sequence
  source: /note="Description of Artificial Sequence: Synthetic oligonucleotide"
tacagccacgtcacaacatgc

SEQ ID NO: 42855 - DNA, 21 bp, Artificial Sequence
  source: /note="Description of Artificial Sequence: Synthetic oligonucleotide"
tacagcatcgcacaccaaagc

SEQ ID NO: 42856 - DNA, 21 bp, Artificial Sequence
  source: /note="Description of Artificial Sequence: Synthetic oligonucleotide"
tacagcctcgcatacagccca

SEQ ID NO: 42857 - DNA, 21 bp, Artificial Sequence
  source: /note="Description of Artificial Sequence: Synthetic oligonucleotide"
tacagcctcgaagacgcacca

SEQ ID NO: 42858 - DNA, 21 bp, Artificial Sequence
  source: /note="Description of Artificial Sequence: Synthetic oligonucleotide"
tacagcctcggaggaccaagc

SEQ ID NO: 42859 - DNA, 21 bp, Artificial Sequence
  source: /note="Description of Artificial Sequence: Synthetic oligonucleotide"
tacagcctcccaacagacctc

SEQ ID NO: 42860 - DNA, 21 bp, Artificial Sequence
  source: /note="Description of Artificial Sequence: Synthetic oligonucleotide"
tacagcctcagccacccaagc

SEQ ID NO: 42861 - DNA, 21 bp, Artificial Sequence
  source: /note="Description of Artificial Sequence: Synthetic oligonucleotide"
tacagcctcacactccacgac

SEQ ID NO: 42862 - DNA, 21 bp, Artificial Sequence
  source: /note="Description of Artificial Sequence: Synthetic oligonucleotide"
tacagcatgcacgcagcaatc

SEQ ID NO: 42863 - DNA, 21 bp, Artificial Sequence
  source: /note="Description of Artificial Sequence: Synthetic oligonucleotide"
tacagcatgaacaaaagccca

SEQ ID NO: 42864 - DNA, 21 bp, Artificial Sequence
  source: /note="Description of Artificial Sequence: Synthetic oligonucleotide"
tacagcatggtcagaacacca

SEQ ID NO: 42865 - DNA, 21 bp, Artificial Sequence
  source: /note="Description of Artificial Sequence: Synthetic oligonucleotide"
tacagcaacgaagcaccaaga

SEQ ID NO: 42866 - DNA, 21 bp, Artificial Sequence
  source: /note="Description of Artificial Sequence: Synthetic oligonucleotide"
tacagcaacgaaaaatgggca

SEQ ID NO: 42867 - DNA, 21 bp, Artificial Sequence
  source: /note="Description of Artificial Sequence: Synthetic oligonucleotide"
tacagcaaccaagcaagagga

SEQ ID NO: 42868 - DNA, 21 bp, Artificial Sequence
  source: /note="Description of Artificial Sequence: Synthetic oligonucleotide"
tacagcccacacttcagacca

SEQ ID NO: 42869 - DNA, 21 bp, Artificial Sequence
  source: /note="Description of Artificial Sequence: Synthetic oligonucleotide"
tacagcccaatcaaaacacac

SEQ ID NO: 42870 - DNA, 21 bp, Artificial Sequence
  source: /note="Description of Artificial Sequence: Synthetic oligonucleotide"
tacagcccaatcagcggaagc

SEQ ID NO: 42871 - DNA, 21 bp, Artificial Sequence
  source: /note="Description of Artificial Sequence: Synthetic oligonucleotide"
tacagcccactcccaagcaga

SEQ ID NO: 42872 - DNA, 21 bp, Artificial Sequence
  source: /note="Description of Artificial Sequence: Synthetic oligonucleotide"
tacagcccactcagccaccac

SEQ ID NO: 42873 - DNA, 21 bp, Artificial Sequence
  source: /note="Description of Artificial Sequence: Synthetic oligonucleotide"
tacagcccaaacctcaacgga

SEQ ID NO: 42874 - DNA, 21 bp, Artificial Sequence
  source: /note="Description of Artificial Sequence: Synthetic oligonucleotide"
tacagcccaccaccaagcatg

SEQ ID NO: 42875 - DNA, 21 bp, Artificial Sequence
  source: /note="Description of Artificial Sequence: Synthetic oligonucleotide"
tacagcccaagaacaccaaca

SEQ ID NO: 42876 - DNA, 21 bp, Artificial Sequence
  source: /note="Description of Artificial Sequence: Synthetic oligonucleotide"
tacagcccaagaacaagcctc

SEQ ID NO: 42877 - DNA, 21 bp, Artificial Sequence
  source: /note="Description of Artificial Sequence: Synthetic oligonucleotide"
tacagcccaacagaagcattc

SEQ ID NO: 42878 - DNA, 21 bp, Artificial Sequence
  source: /note="Description of Artificial Sequence: Synthetic oligonucleotide"
tacagcccaacaagaagcagc

SEQ ID NO: 42879 - DNA, 21 bp, Artificial Sequence
  source: /note="Description of Artificial Sequence: Synthetic oligonucleotide"
tacagccaaagaggagcagac

SEQ ID NO: 42880 - DNA, 21 bp, Artificial Sequence
  source: /note="Description of Artificial Sequence: Synthetic oligonucleotide"
tacagccaaagaaacgacagc

SEQ ID NO: 42881 - DNA, 21 bp, Artificial Sequence
  source: /note="Description of Artificial Sequence: Synthetic oligonucleotide"
tacagcagaccaagcccactc

SEQ ID NO: 42882 - DNA, 21 bp, Artificial Sequence
  source: /note="Description of Artificial Sequence: Synthetic oligonucleotide"
tacagcagcggaggactcaga

SEQ ID NO: 42883 - DNA, 21 bp, Artificial Sequence
  source: /note="Description of Artificial Sequence: Synthetic oligonucleotide"
tacagcagccacctcagaaac

SEQ ID NO: 42884 - DNA, 21 bp, Artificial Sequence
  source: /note="Description of Artificial Sequence: Synthetic oligonucleotide"
tacagcagccacagcagcagc

SEQ ID NO: 42885 - DNA, 21 bp, Artificial Sequence
  source: /note="Description of Artificial Sequence: Synthetic oligonucleotide"
tacagcagcctcgcagcactc

SEQ ID NO: 42886 - DNA, 21 bp, Artificial Sequence
  source: /note="Description of Artificial Sequence: Synthetic oligonucleotide"
tacagcagcaacctcgcaaga

SEQ ID NO: 42887 - DNA, 21 bp, Artificial Sequence
  source: /note="Description of Artificial Sequence: Synthetic oligonucleotide"
tacagcagcccagactggagc

SEQ ID NO: 42888 - DNA, 21 bp, Artificial Sequence
  source: /note="Description of Artificial Sequence: Synthetic oligonucleotide"
tacagcagcccaccaatcaca

SEQ ID NO: 42889 - DNA, 21 bp, Artificial Sequence
  source: /note="Description of Artificial Sequence: Synthetic oligonucleotide"
tacagcagccaactcagcgaa

SEQ ID NO: 42890 - DNA, 21 bp, Artificial Sequence
  source: /note="Description of Artificial Sequence: Synthetic oligonucleotide"
tacagcagcagaggagaagca

SEQ ID NO: 42891 - DNA, 21 bp, Artificial Sequence
  source: /note="Description of Artificial Sequence: Synthetic oligonucleotide"
tacagcagcagcgtcctcgca

SEQ ID NO: 42892 - DNA, 21 bp, Artificial Sequence
  source: /note="Description of Artificial Sequence: Synthetic oligonucleotide"
tacagcacagacagatacagc

SEQ ID NO: 42893 - DNA, 21 bp, Artificial Sequence
  source: /note="Description of Artificial Sequence: Synthetic oligonucleotide"
tacagcacattccaaccagaa

SEQ ID NO: 42894 - DNA, 21 bp, Artificial Sequence
  source: /note="Description of Artificial Sequence: Synthetic oligonucleotide"
tacagcacaatgagaagcatg

SEQ ID NO: 42895 - DNA, 21 bp, Artificial Sequence
  source: /note="Description of Artificial Sequence: Synthetic oligonucleotide"
tacagcacacaaagcctcaac

SEQ ID NO: 42896 - DNA, 21 bp, Artificial Sequence
  source: /note="Description of Artificial Sequence: Synthetic oligonucleotide"
tacagcacaagaagcctcagc

SEQ ID NO: 42897 - DNA, 21 bp, Artificial Sequence
  source: /note="Description of Artificial Sequence: Synthetic oligonucleotide"
tacagcacaacaggaagactc

SEQ ID NO: 42898 - DNA, 21 bp, Artificial Sequence
  source: /note="Description of Artificial Sequence: Synthetic oligonucleotide"
tacagcacaacagtccacgca

SEQ ID NO: 42899 - DNA, 21 bp, Artificial Sequence
  source: /note="Description of Artificial Sequence: Synthetic oligonucleotide"
tacagcacagtcggaagcagc

SEQ ID NO: 42900 - DNA, 21 bp, Artificial Sequence
  source: /note="Description of Artificial Sequence: Synthetic oligonucleotide"
tacagcgtcgacgcagtctgg

SEQ ID NO: 42901 - DNA, 21 bp, Artificial Sequence
  source: /note="Description of Artificial Sequence: Synthetic oligonucleotide"
tacagcgtcagaacaatgagc

SEQ ID NO: 42902 - DNA, 21 bp, Artificial Sequence
  source: /note="Description of Artificial Sequence: Synthetic oligonucleotide"
tacagcgtcgtcacagtcgac

SEQ ID NO: 42903 - DNA, 21 bp, Artificial Sequence
  source: /note="Description of Artificial Sequence: Synthetic oligonucleotide"
tacagctacaacagcgaccac

SEQ ID NO: 42904 - DNA, 21 bp, Artificial Sequence
  source: /note="Description of Artificial Sequence: Synthetic oligonucleotide"
tacacagcaggagtcagcgca

SEQ ID NO: 42905 - DNA, 21 bp, Artificial Sequence
  source: /note="Description of Artificial Sequence: Synthetic oligonucleotide"
tacacagcaagagcacaaagc

SEQ ID NO: 42906 - DNA, 21 bp, Artificial Sequence
  source: /note="Description of Artificial Sequence: Synthetic oligonucleotide"
tacacagcaagcggagacatc

SEQ ID NO: 42907 - DNA, 21 bp, Artificial Sequence
  source: /note="Description of Artificial Sequence: Synthetic oligonucleotide"
tacacagaattcgcagcaaac

SEQ ID NO: 42908 - DNA, 21 bp, Artificial Sequence
  source: /note="Description of Artificial Sequence: Synthetic oligonucleotide"
tacacaggattcacactcgac

SEQ ID NO: 42909 - DNA, 21 bp, Artificial Sequence
  source: /note="Description of Artificial Sequence: Synthetic oligonucleotide"
tacacaggaggacaactccac

SEQ ID NO: 42910 - DNA, 21 bp, Artificial Sequence
  source: /note="Description of Artificial Sequence: Synthetic oligonucleotide"
tacacaggactcgaaccaagc

SEQ ID NO: 42911 - DNA, 21 bp, Artificial Sequence
  source: /note="Description of Artificial Sequence: Synthetic oligonucleotide"
tacacaggaagcagcgtcctc

SEQ ID NO: 42912 - DNA, 21 bp, Artificial Sequence
  source: /note="Description of Artificial Sequence: Synthetic oligonucleotide"
tacacacacctcacaacagca

SEQ ID NO: 42913 - DNA, 21 bp, Artificial Sequence
  source: /note="Description of Artificial Sequence: Synthetic oligonucleotide"
tacacacacagcatcgtcaca

SEQ ID NO: 42914 - DNA, 21 bp, Artificial Sequence
  source: /note="Description of Artificial Sequence: Synthetic oligonucleotide"
tacacacacgtcctcacacca

SEQ ID NO: 42915 - DNA, 21 bp, Artificial Sequence
  source: /note="Description of Artificial Sequence: Synthetic oligonucleotide"
tacacaaaaatgctcggacca

SEQ ID NO: 42916 - DNA, 21 bp, Artificial Sequence
  source: /note="Description of Artificial Sequence: Synthetic oligonucleotide"
tacacaaaaaacagcacagtc

SEQ ID NO: 42917 - DNA, 21 bp, Artificial Sequence
  source: /note="Description of Artificial Sequence: Synthetic oligonucleotide"
tacacactcgaccaactcagc

SEQ ID NO: 42918 - DNA, 21 bp, Artificial Sequence
  source: /note="Description of Artificial Sequence: Synthetic oligonucleotide"
tacacactcagcgcaacaaca

SEQ ID NO: 42919 - DNA, 21 bp, Artificial Sequence
  source: /note="Description of Artificial Sequence: Synthetic oligonucleotide"
tacacaatgagcccaagacca

SEQ ID NO: 42920 - DNA, 21 bp, Artificial Sequence
  source: /note="Description of Artificial Sequence: Synthetic oligonucleotide"
tacacaaacgacagaagaagc

SEQ ID NO: 42921 - DNA, 21 bp, Artificial Sequence
  source: /note="Description of Artificial Sequence: Synthetic oligonucleotide"
tacacaaacaacttcgtcgca

SEQ ID NO: 42922 - DNA, 21 bp, Artificial Sequence
  source: /note="Description of Artificial Sequence: Synthetic oligonucleotide"
tacacaccagcaggactcagc

SEQ ID NO: 42923 - DNA, 21 bp, Artificial Sequence
  source: /note="Description of Artificial Sequence: Synthetic oligonucleotide"
tacacaccacacagaatgagc

SEQ ID NO: 42924 - DNA, 21 bp, Artificial Sequence
  source: /note="Description of Artificial Sequence: Synthetic oligonucleotide"
tacacaccactcatgagcagc

SEQ ID NO: 42925 - DNA, 21 bp, Artificial Sequence
  source: /note="Description of Artificial Sequence: Synthetic oligonucleotide"
tacacacaaagcaaaacagaa

SEQ ID NO: 42926 - DNA, 21 bp, Artificial Sequence
  source: /note="Description of Artificial Sequence: Synthetic oligonucleotide"
tacacacaaacaacatggaaa

SEQ ID NO: 42927 - DNA, 21 bp, Artificial Sequence
  source: /note="Description of Artificial Sequence: Synthetic oligonucleotide"
tacacaagagcaccagacgga

SEQ ID NO: 42928 - DNA, 21 bp, Artificial Sequence
  source: /note="Description of Artificial Sequence: Synthetic oligonucleotide"
tacacaagccacccaacatgc

SEQ ID NO: 42929 - DNA, 21 bp, Artificial Sequence
  source: /note="Description of Artificial Sequence: Synthetic oligonucleotide"
tacacaagcatcagcaacatg

SEQ ID NO: 42930 - DNA, 21 bp, Artificial Sequence
  source: /note="Description of Artificial Sequence: Synthetic oligonucleotide"
tacacaagcctcagcatggca

SEQ ID NO: 42931 - DNA, 21 bp, Artificial Sequence
  source: /note="Description of Artificial Sequence: Synthetic oligonucleotide"
tacacaagcatgcacgtcagc

SEQ ID NO: 42932 - DNA, 21 bp, Artificial Sequence
  source: /note="Description of Artificial Sequence: Synthetic oligonucleotide"
tacacaagcaacatcgacatg

SEQ ID NO: 42933 - DNA, 21 bp, Artificial Sequence
  source: /note="Description of Artificial Sequence: Synthetic oligonucleotide"
tacacaagcccagcacacgtc

SEQ ID NO: 42934 - DNA, 21 bp, Artificial Sequence
  source: /note="Description of Artificial Sequence: Synthetic oligonucleotide"
tacacaagcagacacatcgca

SEQ ID NO: 42935 - DNA, 21 bp, Artificial Sequence
  source: /note="Description of Artificial Sequence: Synthetic oligonucleotide"
tacacaagcagagtcctcagc

SEQ ID NO: 42936 - DNA, 21 bp, Artificial Sequence
  source: /note="Description of Artificial Sequence: Synthetic oligonucleotide"
tacacaagcgtctacgcacac

SEQ ID NO: 42937 - DNA, 21 bp, Artificial Sequence
  source: /note="Description of Artificial Sequence: Synthetic oligonucleotide"
tacacaagctacacagcacca

SEQ ID NO: 42938 - DNA, 21 bp, Artificial Sequence
  source: /note="Description of Artificial Sequence: Synthetic oligonucleotide"
tacacaacactcccagcaaga

SEQ ID NO: 42939 - DNA, 21 bp, Artificial Sequence
  source: /note="Description of Artificial Sequence: Synthetic oligonucleotide"
tacacaacaaacagacaaagc

SEQ ID NO: 42940 - DNA, 21 bp, Artificial Sequence
  source: /note="Description of Artificial Sequence: Synthetic oligonucleotide"
tacacaacaagcccagcactc

SEQ ID NO: 42941 - DNA, 21 bp, Artificial Sequence
  source: /note="Description of Artificial Sequence: Synthetic oligonucleotide"
tacacaacaagcccaatcaaa

SEQ ID NO: 42942 - DNA, 21 bp, Artificial Sequence
  source: /note="Description of Artificial Sequence: Synthetic oligonucleotide"
tacacagtcagacacgtcaac

SEQ ID NO: 42943 - DNA, 21 bp, Artificial Sequence
  source: /note="Description of Artificial Sequence: Synthetic oligonucleotide"
tacgtcgcaacagaacaaaaa

SEQ ID NO: 42944 - DNA, 21 bp, Artificial Sequence
  source: /note="Description of Artificial Sequence: Synthetic oligonucleotide"
tacgtcgacgacccaagcgga

SEQ ID NO: 42945 - DNA, 21 bp, Artificial Sequence
  source: /note="Description of Artificial Sequence: Synthetic oligonucleotide"
tacgtccacctcaacacaaca

SEQ ID NO: 42946 - DNA, 21 bp, Artificial Sequence
  source: /note="Description of Artificial Sequence: Synthetic oligonucleotide"
tacgtcaaactctacgaaaaa

SEQ ID NO: 42947 - DNA, 21 bp, Artificial Sequence
  source: /note="Description of Artificial Sequence: Synthetic oligonucleotide"
tacgtcaaaccaaacggagca

SEQ ID NO: 42948 - DNA, 21 bp, Artificial Sequence
  source: /note="Description of Artificial Sequence: Synthetic oligonucleotide"
tacgtcaaaagccaaacagca

SEQ ID NO: 42949 - DNA, 21 bp, Artificial Sequence
  source: /note="Description of Artificial Sequence: Synthetic oligonucleotide"
tacgtcatgagccaaagcgca

SEQ ID NO: 42950 - DNA, 21 bp, Artificial Sequence
  source: /note="Description of Artificial Sequence: Synthetic oligonucleotide"
tacgtcccaggaagaaacgaa

SEQ ID NO: 42951 - DNA, 21 bp, Artificial Sequence
  source: /note="Description of Artificial Sequence: Synthetic oligonucleotide"
tacgtcccaatgacaagccca

SEQ ID NO: 42952 - DNA, 21 bp, Artificial Sequence
  source: /note="Description of Artificial Sequence: Synthetic oligonucleotide"
tacgtcccaacaagcctcgga

SEQ ID NO: 42953 - DNA, 21 bp, Artificial Sequence
  source: /note="Description of Artificial Sequence: Synthetic oligonucleotide"
tacgtccaacaacacgtcaaa

SEQ ID NO: 42954 - DNA, 21 bp, Artificial Sequence
  source: /note="Description of Artificial Sequence: Synthetic oligonucleotide"
tacgtcagaggaatggacgca

SEQ ID NO: 42955 - DNA, 21 bp, Artificial Sequence
  source: /note="Description of Artificial Sequence: Synthetic oligonucleotide"
tacgtcagagtcagcaacgtc

SEQ ID NO: 42956 - DNA, 21 bp, Artificial Sequence
  source: /note="Description of Artificial Sequence: Synthetic oligonucleotide"
tacgtcagccacgtcgacctc

SEQ ID NO: 42957 - DNA, 21 bp, Artificial Sequence
  source: /note="Description of Artificial Sequence: Synthetic oligonucleotide"
tacgtcagcatgccaaacgga

SEQ ID NO: 42958 - DNA, 21 bp, Artificial Sequence
  source: /note="Description of Artificial Sequence: Synthetic oligonucleotide"
tacgtcacagacagaatgcca

SEQ ID NO: 42959 - DNA, 21 bp, Artificial Sequence
  source: /note="Description of Artificial Sequence: Synthetic oligonucleotide"
tacgtcacaggacaccacgac

SEQ ID NO: 42960 - DNA, 21 bp, Artificial Sequence
  source: /note="Description of Artificial Sequence: Synthetic oligonucleotide"
tacgtcacaaaagcaccactc

SEQ ID NO: 42961 - DNA, 21 bp, Artificial Sequence
  source: /note="Description of Artificial Sequence: Synthetic oligonucleotide"
tacgtcacacaaatccacgga

SEQ ID NO: 42962 - DNA, 21 bp, Artificial Sequence
  source: /note="Description of Artificial Sequence: Synthetic oligonucleotide"
tacgtcgtcgaaccagaacca

SEQ ID NO: 42963 - DNA, 21 bp, Artificial Sequence
  source: /note="Description of Artificial Sequence: Synthetic oligonucleotide"
tacgtcgtcaacctcccaaga

SEQ ID NO: 42964 - DNA, 21 bp, Artificial Sequence
  source: /note="Description of Artificial Sequence: Synthetic oligonucleotide"
tacgtcgtcagagcagacgga

SEQ ID NO: 42965 - DNA, 21 bp, Artificial Sequence
  source: /note="Description of Artificial Sequence: Synthetic oligonucleotide"
tactacgacagaagcatcgga

SEQ ID NO: 42966 - DNA, 21 bp, Artificial Sequence
  source: /note="Description of Artificial Sequence: Synthetic oligonucleotide"
tactacgaaagcagcaaacaa

SEQ ID NO: 42967 - DNA, 21 bp, Artificial Sequence
  source: /note="Description of Artificial Sequence: Synthetic oligonucleotide"
tactacggaagcgcaccagca

SEQ ID NO: 42968 - DNA, 21 bp, Artificial Sequence
  source: /note="Description of Artificial Sequence: Synthetic oligonucleotide"
tactacggagtccacccaaac

SEQ ID NO: 42969 - DNA, 21 bp, Artificial Sequence
  source: /note="Description of Artificial Sequence: Synthetic oligonucleotide"
tactacaacccaagcacaagc

SEQ ID NO: 42970 - DNA, 21 bp, Artificial Sequence
  source: /note="Description of Artificial Sequence: Synthetic oligonucleotide"
tactacccaagaccaggagga

SEQ ID NO: 42971 - DNA, 21 bp, Artificial Sequence
  source: /note="Description of Artificial Sequence: Synthetic oligonucleotide"
tactacagcgcaatggcagac

SEQ ID NO: 42972 - DNA, 21 bp, Artificial Sequence
  source: /note="Description of Artificial Sequence: Synthetic oligonucleotide"
tactacagcaacacagtcaca

SEQ ID NO: 42973 - protein, 9 aa, Artificial Sequence
  source: /note="Description of Artificial Sequence: Synthetic peptide"
DGSPTVPFK

SEQ ID NO: 42974 - protein, 9 aa, Artificial Sequence
  source: /note="Description of Artificial Sequence: Synthetic peptide"
DGTLEVPFK

SEQ ID NO: 42975 - protein, 9 aa, Artificial Sequence
  source: /note="Description of Artificial Sequence: Synthetic peptide"
DGTPQVPFK

SEQ ID NO: 42976 - protein, 9 aa, Artificial Sequence
  source: /note="Description of Artificial Sequence: Synthetic peptide"
DGTPTVPFK

SEQ ID NO: 42977 - protein, 9 aa, Artificial Sequence
  source: /note="Description of Artificial Sequence: Synthetic peptide"
DGDLQVPFK

SEQ ID NO: 42978 - protein, 9 aa, Artificial Sequence
  source: /note="Description of Artificial Sequence: Synthetic peptide"
DGDLRVPFK

SEQ ID NO: 42979 - protein, 9 aa, Artificial Sequence
  source: /note="Description of Artificial Sequence: Synthetic peptide"
DGNLTVPFK

SEQ ID NO: 42980 - protein, 9 aa, Artificial Sequence
  source: /note="Description of Artificial Sequence: Synthetic peptide"
DGQPTVPFK

SEQ ID NO: 42981 - protein, 9 aa, Artificial Sequence
  source: /note="Description of Artificial Sequence: Synthetic peptide"
DGSIQVPFK

SEQ ID NO: 42982 - protein, 9 aa, Artificial Sequence
  source: /note="Description of Artificial Sequence: Synthetic peptide"
DGSLKVPFK

SEQ ID NO: 42983 - protein, 9 aa, Artificial Sequence
  source: /note="Description of Artificial Sequence: Synthetic peptide"
DGSPQVPFK

SEQ ID NO: 42984 - protein, 9 aa, Artificial Sequence
  source: /note="Description of Artificial Sequence: Synthetic peptide"
DGSRSVPFK

SEQ ID NO: 42985 - protein, 9 aa, Artificial Sequence
  source: /note="Description of Artificial Sequence: Synthetic peptide"
DGSTTVPFK

SEQ ID NO: 42986 - protein, 9 aa, Artificial Sequence
  source: /note="Description of Artificial Sequence: Synthetic peptide"
DGTARVPFK

SEQ ID NO: 42987 - protein, 9 aa, Artificial Sequence
  source: /note="Description of Artificial Sequence: Synthetic peptide"
DGTEKVPFK

SEQ ID NO: 42988 - protein, 9 aa, Artificial Sequence
  source: /note="Description of Artificial Sequence: Synthetic peptide"
DGTLHVPFK

SEQ ID NO: 42989 - protein, 9 aa, Artificial Sequence
  source: /note="Description of Artificial Sequence: Synthetic peptide"
DGTLNVPFK

SEQ ID NO: 42990 - protein, 9 aa, Artificial Sequence
  source: /note="Description of Artificial Sequence: Synthetic peptide"
DGTLQVPFK

SEQ ID NO: 42991 - protein, 9 aa, Artificial Sequence
  source: /note="Description of Artificial Sequence: Synthetic peptide"
DGTLSVPFK

SEQ ID NO: 42992 - protein, 9 aa, Artificial Sequence
  source: /note="Description of Artificial Sequence: Synthetic peptide"
DGTPLVPFK

SEQ ID NO: 42993 - protein, 9 aa, Artificial Sequence
  source: /note="Description of Artificial Sequence: Synthetic peptide"
DGTPPVPFK

SEQ ID NO: 42994 - protein, 9 aa, Artificial Sequence
  source: /note="Description of Artificial Sequence: Synthetic peptide"
DGTQAVPFK

SEQ ID NO: 42995 - protein, 9 aa, Artificial Sequence
  source: /note="Description of Artificial Sequence: Synthetic peptide"
DGTREVPFK

SEQ ID NO: 42996 - protein, 9 aa, Artificial Sequence
  source: /note="Description of Artificial Sequence: Synthetic peptide"
DGTRQVPFK

SEQ ID NO: 42997 - protein, 9 aa, Artificial Sequence
  source: /note="Description of Artificial Sequence: Synthetic peptide"
DGTRTVPFK

SEQ ID NO: 42998 - protein, 9 aa, Artificial Sequence
  source: /note="Description of Artificial Sequence: Synthetic peptide"
DGTSKVPFK

SEQ ID NO: 42999 - protein, 9 aa, Artificial Sequence
  source: /note="Description of Artificial Sequence: Synthetic peptide"
DGTVNVPFK

SEQ ID NO: 43000 - DNA, 27 bp, Artificial Sequence
  source: /note="Description of Artificial Sequence: Synthetic oligonucleotide"
gatgggtcgcctactgtgccttttaag

SEQ ID NO: 43001 - DNA, 27 bp, Artificial Sequence
  source: /note="Description of Artificial Sequence: Synthetic oligonucleotide"
gatgggactctggaggtgccttttaag

SEQ ID NO: 43002 - DNA, 27 bp, Artificial Sequence
  source: /note="Description of Artificial Sequence: Synthetic oligonucleotide"
gatgggacgccgcaggtgccttttaag

SEQ ID NO: 43003 - DNA, 27 bp, Artificial Sequence
  source: /note="Description of Artificial Sequence: Synthetic oligonucleotide"
gatgggacgccgactgtgccttttaag

SEQ ID NO: 43004 - DNA, 27 bp, Artificial Sequence
  source: /note="Description of Artificial Sequence: Synthetic oligonucleotide"
gatggggatttgcaggtgccttttaag

SEQ ID NO: 43005 - DNA, 27 bp, Artificial Sequence
  source: /note="Description of Artificial Sequence: Synthetic oligonucleotide"
gatggggatttgagggtgccttttaag

SEQ ID NO: 43006 - DNA, 27 bp, Artificial Sequence
  source: /note="Description of Artificial Sequence: Synthetic oligonucleotide"
gatgggaatcttacggtgccttttaag

SEQ ID NO: 43007 - DNA, 27 bp, Artificial Sequence
  source: /note="Description of Artificial Sequence: Synthetic oligonucleotide"
gatgggcagcctacggtgccttttaag

SEQ ID NO: 43008 - DNA, 27 bp, Artificial Sequence
  source: /note="Description of Artificial Sequence: Synthetic oligonucleotide"
gatgggtcgattcaggtgccttttaag

SEQ ID NO: 43009 - DNA, 27 bp, Artificial Sequence
  source: /note="Description of Artificial Sequence: Synthetic oligonucleotide"
gatgggtcgttgaaggtgccttttaag

SEQ ID NO: 43010 - DNA, 27 bp, Artificial Sequence
  source: /note="Description of Artificial Sequence: Synthetic oligonucleotide"
gatgggtcgccgcaggtgccttttaag

SEQ ID NO: 43011 - DNA, 27 bp, Artificial Sequence
  source: /note="Description of Artificial Sequence: Synthetic oligonucleotide"
gatgggtcgcggtcggtgccgtttaag

SEQ ID NO: 43012 - DNA, 27 bp, Artificial Sequence
  source: /note="Description of Artificial Sequence: Synthetic oligonucleotide"
gatgggtcgactactgtgccttttaag

SEQ ID NO: 43013 - DNA, 27 bp, Artificial Sequence
  source: /note="Description of Artificial Sequence: Synthetic oligonucleotide"
gatgggacggcgcgggtgccttttaag

SEQ ID NO: 43014 - DNA, 27 bp, Artificial Sequence
  source: /note="Description of Artificial Sequence: Synthetic oligonucleotide"
gatgggactgagaaggtgccttttaag

SEQ ID NO: 43015 - DNA, 27 bp, Artificial Sequence
  source: /note="Description of Artificial Sequence: Synthetic oligonucleotide"
gatgggactctgcatgtgccttttaag

SEQ ID NO: 43016 - DNA, 27 bp, Artificial Sequence
  source: /note="Description of Artificial Sequence: Synthetic oligonucleotide"
gatgggactcttaatgtgccttttaag

SEQ ID NO: 43017 - DNA, 27 bp, Artificial Sequence
  source: /note="Description of Artificial Sequence: Synthetic oligonucleotide"
gatgggactctgcaggtgccttttaag

SEQ ID NO: 43018 - DNA, 27 bp, Artificial Sequence
  source: /note="Description of Artificial Sequence: Synthetic oligonucleotide"
gatgggacgctgagtgtgccttttaag

SEQ ID NO: 43019 - DNA, 27 bp, Artificial Sequence
  source: /note="Description of Artificial Sequence: Synthetic oligonucleotide"
gatgggactcctttggtgccttttaag

SEQ ID NO: 43020 - DNA, 27 bp, Artificial Sequence
  source: /note="Description of Artificial Sequence: Synthetic oligonucleotide"
gatgggactccgcctgtgccttttaag

SEQ ID NO: 43021 - DNA, 27 bp, Artificial Sequence
  source: /note="Description of Artificial Sequence: Synthetic oligonucleotide"
gatgggacgcaggcggtgccttttaag

SEQ ID NO: 43022 - DNA, 27 bp, Artificial Sequence
  source: /note="Description of Artificial Sequence: Synthetic oligonucleotide"
gatgggacgcgtgaggtgccttttaag

SEQ ID NO: 43023 - DNA, 27 bp, Artificial Sequence
  source: /note="Description of Artificial Sequence: Synthetic oligonucleotide"
gatgggactaggcaggtgccttttaag

SEQ ID NO: 43024 - DNA, 27 bp, Artificial Sequence
  source: /note="Description of Artificial Sequence: Synthetic oligonucleotide"
gatgggacgcgtactgtgccttttaag

SEQ ID NO: 43025 - DNA, 27 bp, Artificial Sequence
  source: /note="Description of Artificial Sequence: Synthetic oligonucleotide"
gatgggacgagtaaggtgccttttaag

SEQ ID NO: 43026 - DNA, 27 bp, Artificial Sequence
  source: /note="Description of Artificial Sequence: Synthetic oligonucleotide"
gatgggacggttaatgtgccttttaag

SEQ ID NO: 43027 - DNA, 27 bp, Artificial Sequence
  source: /note="Description of Artificial Sequence: Synthetic oligonucleotide"
gatgggtctcctacggtgccttttaag

SEQ ID NO: 43028 - DNA, 27 bp, Artificial Sequence
  source: /note="Description of Artificial Sequence: Synthetic oligonucleotide"
gatgggacgttggaggtgccttttaag

SEQ ID NO: 43029 - DNA, 27 bp, Artificial Sequence
  source: /note="Description of Artificial Sequence: Synthetic oligonucleotide"
gatgggactcctcaggtgccttttaag

SEQ ID NO: 43030 - DNA, 27 bp, Artificial Sequence
  source: /note="Description of Artificial Sequence: Synthetic oligonucleotide"
gatgggactccgacggtgccttttaag

SEQ ID NO: 43031 - DNA, 27 bp, Artificial Sequence
  source: /note="Description of Artificial Sequence: Synthetic oligonucleotide"
gacggagacctccaagtcccattcaaa

SEQ ID NO: 43032 - DNA, 27 bp, Artificial Sequence
  source: /note="Description of Artificial Sequence: Synthetic oligonucleotide"
gacggagacctcagagtcccattcaaa

SEQ ID NO: 43033 - DNA, 27 bp, Artificial Sequence
  source: /note="Description of Artificial Sequence: Synthetic oligonucleotide"
gacggaaacctcacagtcccattcaaa

SEQ ID NO: 43034 - DNA, 27 bp, Artificial Sequence
  source: /note="Description of Artificial Sequence: Synthetic oligonucleotide"
gacggacaaccaacagtcccattcaaa

SEQ ID NO: 43035 - DNA, 27 bp, Artificial Sequence
  source: /note="Description of Artificial Sequence: Synthetic oligonucleotide"
gacggaagcatccaagtcccattcaaa

SEQ ID NO: 43036 - DNA, 27 bp, Artificial Sequence
  source: /note="Description of Artificial Sequence: Synthetic oligonucleotide"
gacggaagcctcaaagtcccattcaaa

SEQ ID NO: 43037 - DNA, 27 bp, Artificial Sequence
  source: /note="Description of Artificial Sequence: Synthetic oligonucleotide"
gacggaagcccacaagtcccattcaaa

SEQ ID NO: 43038 - DNA, 27 bp, Artificial Sequence
  source: /note="Description of Artificial Sequence: Synthetic oligonucleotide"
gacggaagcagaagcgtcccattcaaa

SEQ ID NO: 43039 - DNA, 27 bp, Artificial Sequence
  source: /note="Description of Artificial Sequence: Synthetic oligonucleotide"
gacggaagcacaacagtcccattcaaa

SEQ ID NO: 43040 - DNA, 27 bp, Artificial Sequence
  source: /note="Description of Artificial Sequence: Synthetic oligonucleotide"
gacggaacagcaagagtcccattcaaa

SEQ ID NO: 43041 - DNA, 27 bp, Artificial Sequence
  source: /note="Description of Artificial Sequence: Synthetic oligonucleotide"
gacggaacagaaaaagtcccattcaaa

SEQ ID NO: 43042 - DNA, 27 bp, Artificial Sequence
  source: /note="Description of Artificial Sequence: Synthetic oligonucleotide"
gacggaacactccacgtcccattcaaa

SEQ ID NO: 43043 - DNA, 27 bp, Artificial Sequence
  source: /note="Description of Artificial Sequence: Synthetic oligonucleotide"
gacggaacactcaacgtcccattcaaa

SEQ ID NO: 43044 - DNA, 27 bp, Artificial Sequence
  source: /note="Description of Artificial Sequence: Synthetic oligonucleotide"
gacggaacactccaagtcccattcaaa

SEQ ID NO: 43045 - DNA, 27 bp, Artificial Sequence
  source: /note="Description of Artificial Sequence: Synthetic oligonucleotide"
gacggaacactcagcgtcccattcaaa

SEQ ID NO: 43046 - DNA, 27 bp, Artificial Sequence
  source: /note="Description of Artificial Sequence: Synthetic oligonucleotide"
gacggaacaccactcgtcccattcaaa

SEQ ID NO: 43047 - DNA, 27 bp, Artificial Sequence
  source: /note="Description of Artificial Sequence: Synthetic oligonucleotide"
gacggaacaccaccagtcccattcaaa

SEQ ID NO: 43048 - DNA, 27 bp, Artificial Sequence
  source: /note="Description of Artificial Sequence: Synthetic oligonucleotide"
gacggaacacaagcagtcccattcaaa

SEQ ID NO: 43049 - DNA, 27 bp, Artificial Sequence
  source: /note="Description of Artificial Sequence: Synthetic oligonucleotide"
gacggaacaagagaagtcccattcaaa

SEQ ID NO: 43050 - DNA, 27 bp, Artificial Sequence
  source: /note="Description of Artificial Sequence: Synthetic oligonucleotide"
gacggaacaagacaagtcccattcaaa

SEQ ID NO: 43051 - DNA, 27 bp, Artificial Sequence
  source: /note="Description of Artificial Sequence: Synthetic oligonucleotide"
gacggaacaagaacagtcccattcaaa

SEQ ID NO: 43052 - DNA, 27 bp, Artificial Sequence
  source: /note="Description of Artificial Sequence: Synthetic oligonucleotide"
gacggaacaagcaaagtcccattcaaa

SEQ ID NO: 43053 - DNA, 27 bp, Artificial Sequence
  source: /note="Description of Artificial Sequence: Synthetic oligonucleotide"
gacggaacagtcaacgtcccattcaaa

SEQ ID NO: 43054 - protein, 7 aa, Artificial Sequence
  source: /note="Description of Artificial Sequence: Synthetic peptide"
TLAVPFK

SEQ ID NO: 43055 - protein, 7 aa, Artificial Sequence
  source: /note="Description of Artificial Sequence: Synthetic peptide"
YTLSQGW

SEQ ID NO: 43056 - protein, 7 aa, Artificial Sequence
  source: /note="Description of Artificial Sequence: Synthetic peptide"
SVSKPFL

SEQ ID NO: 43057 - protein, 7 aa, Artificial Sequence
  source: /note="Description of Artificial Sequence: Synthetic peptide"
FTLTTPK

SEQ ID NO: 43058 - protein, 7 aa, Artificial Sequence
  source: /note="Description of Artificial Sequence: Synthetic peptide"
QAVRTSL

SEQ ID NO: 43059 - protein, 11 aa, Artificial Sequence
  source: /note="Description of Artificial Sequence: Synthetic peptide"
DGTLAVPFKAQ

SEQ ID NO: 43060 - protein, 7 aa, Artificial Sequence
  source: /note="Description of Artificial Sequence: Synthetic peptide"
MNSTKNV

SEQ ID NO: 43061 - protein, 7 aa, Artificial Sequence
  source: /note="Description of Artificial Sequence: Synthetic peptide"
VSGGHHS

SEQ ID NO: 43062 - protein, 11 aa, Artificial Sequence
  source: /note="Description of Artificial Sequence: Synthetic peptide"
ESTLAVPFKAQ

SEQ ID NO: 43063 - protein, 11 aa, Artificial Sequence
  source: /note="Description of Artificial Sequence: Synthetic peptide"
GGTLAVPFKAQ

SEQ ID NO: 43064 - protein, 11 aa, Artificial Sequence
  source: /note="Description of Artificial Sequence: Synthetic peptide"
AQTLATPFKAQ

SEQ ID NO: 43065 - protein, 11 aa, Artificial Sequence
  source: /note="Description of Artificial Sequence: Synthetic peptide"
ATTLATPFKAQ

SEQ ID NO: 43066 - protein, 11 aa, Artificial Sequence
  source: /note="Description of Artificial Sequence: Synthetic peptide"
DGTLATPFKAQ

SEQ ID NO: 43067 - protein, 11 aa, Artificial Sequence
  source: /note="Description of Artificial Sequence: Synthetic peptide"
GGTLATPFKAQ

SEQ ID NO: 43068 - protein, 11 aa, Artificial Sequence
  source: /note="Description of Artificial Sequence: Synthetic peptide"
SGSLAVPFKAQ

SEQ ID NO: 43069 - protein, 11 aa, Artificial Sequence
  source: /note="Description of Artificial Sequence: Synthetic peptide"
AQTLAQPFKAQ

SEQ ID NO: 43070 - protein, 11 aa, Artificial Sequence
  source: /note="Description of Artificial Sequence: Synthetic peptide"
AQTLQQPFKAQ

SEQ ID NO: 43071 - protein, 11 aa, Artificial Sequence
  source: /note="Description of Artificial Sequence: Synthetic peptide"
AQTLSNPFKAQ

SEQ ID NO: 43072 - protein, 11 aa, Artificial Sequence
  source: /note="Description of Artificial Sequence: Synthetic peptide"
AQTLAVPFSNP

SEQ ID NO: 43073 - protein, 11 aa, Artificial Sequence
  source: /note="Description of Artificial Sequence: Synthetic peptide"
PSSAVRTSLAQ

SEQ ID NO: 43074 - protein, 11 aa, Artificial Sequence
  source: /note="Description of Artificial Sequence: Synthetic peptide"
EPAAVRTSLAQ

SEQ ID NO: 43075 - protein, 11 aa, Artificial Sequence
  source: /note="Description of Artificial Sequence: Synthetic peptide"
DPAAVRTSLAQ

SEQ ID NO: 43076 - protein, 11 aa, Artificial Sequence
  source: /note="Description of Artificial Sequence: Synthetic peptide"
AQQAPNHSLAQ

SEQ ID NO: 43077 - protein, 11 aa, Artificial Sequence
  source: /note="Description of Artificial Sequence: Synthetic peptide"
AQQASSSSLAQ

SEQ ID NO: 43078 - protein, 11 aa, Artificial Sequence
  source: /note="Description of Artificial Sequence: Synthetic peptide"
AQQASTKSLAQ

SEQ ID NO: 43079 - protein, 11 aa, Artificial Sequence
  source: /note="Description of Artificial Sequence: Synthetic peptide"
AQQAGPTSLAQ

SEQ ID NO: 43080 - protein, 11 aa, Artificial Sequence
  source: /note="Description of Artificial Sequence: Synthetic peptide"
AQQAVRESNAQ

SEQ ID NO: 43081 - protein, 11 aa, Artificial Sequence
  source: /note="Description of Artificial Sequence: Synthetic peptide"
AQQAVRNSTAQ

SEQ ID NO: 43082 - protein, 11 aa, Artificial Sequence
  source: /note="Description of Artificial Sequence: Synthetic peptide"
AQQAVRTSAGV

SEQ ID NO: 43083 - protein, 11 aa, Artificial Sequence
  source: /note="Description of Artificial Sequence: Synthetic peptide"
AQAGQIHHNAQ

SEQ ID NO: 43084 - protein, 11 aa, Artificial Sequence
  source: /note="Description of Artificial Sequence: Synthetic peptide"
AQAGSDKAKAQ

SEQ ID NO: 43085 - protein, 11 aa, Artificial Sequence
  source: /note="Description of Artificial Sequence: Synthetic peptide"
AQALNGARLAQ

SEQ ID NO: 43086 - protein, 11 aa, Artificial Sequence
  source: /note="Description of Artificial Sequence: Synthetic peptide"
AQASDRALPAQ

SEQ ID NO: 43087 - protein, 11 aa, Artificial Sequence
  source: /note="Description of Artificial Sequence: Synthetic peptide"
AQASVLAHPAQ

SEQ ID NO: 43088 - protein, 11 aa, Artificial Sequence
  source: /note="Description of Artificial Sequence: Synthetic peptide"
AQAVKGLDLAQ

SEQ ID NO: 43089 - protein, 11 aa, Artificial Sequence
  source: /note="Description of Artificial Sequence: Synthetic peptide"
AQDATRALAAQ

SEQ ID NO: 43090 - protein, 11 aa, Artificial Sequence
  source: /note="Description of Artificial Sequence: Synthetic peptide"
AQDTQVARSAQ

SEQ ID NO: 43091 - protein, 11 aa, Artificial Sequence
  source: /note="Description of Artificial Sequence: Synthetic peptide"
AQDTRGIMAAQ

SEQ ID NO: 43092 - protein, 11 aa, Artificial Sequence
  source: /note="Description of Artificial Sequence: Synthetic peptide"
AQEMRGLAIAQ

SEQ ID NO: 43093 - protein, 11 aa, Artificial Sequence
  source: /note="Description of Artificial Sequence: Synthetic peptide"
AQFAGSNAAAQ

SEQ ID NO: 43094 - protein, 11 aa, Artificial Sequence
  source: /note="Description of Artificial Sequence: Synthetic peptide"
AQGADLRNPAQ

SEQ ID NO: 43095 - protein, 11 aa, Artificial Sequence
  source: /note="Description of Artificial Sequence: Synthetic peptide"
AQGFSNHDPAQ

SEQ ID NO: 43096 - protein, 11 aa, Artificial Sequence
  source: /note="Description of Artificial Sequence: Synthetic peptide"
AQGLTATVPAQ

SEQ ID NO: 43097 - protein, 11 aa, Artificial Sequence
  source: /note="Description of Artificial Sequence: Synthetic peptide"
AQGPTSDRQAQ

SEQ ID NO: 43098 - protein, 11 aa, Artificial Sequence
  source: /note="Description of Artificial Sequence: Synthetic peptide"
AQGRMDSRPAQ

SEQ ID NO: 43099 - protein, 11 aa, Artificial Sequence
  source: /note="Description of Artificial Sequence: Synthetic peptide"
AQGSSPQATAQ

SEQ ID NO: 43100 - protein, 11 aa, Artificial Sequence
  source: /note="Description of Artificial Sequence: Synthetic peptide"
AQHAKITYDAQ

SEQ ID NO: 43101 - protein, 11 aa, Artificial Sequence
  source: /note="Description of Artificial Sequence: Synthetic peptide"
AQIADSRNSAQ

SEQ ID NO: 43102 - protein, 11 aa, Artificial Sequence
  source: /note="Description of Artificial Sequence: Synthetic peptide"
AQINVANRSAQ

SEQ ID NO: 43103 - protein, 11 aa, Artificial Sequence
  source: /note="Description of Artificial Sequence: Synthetic peptide"
AQIRSTNNSAQ

SEQ ID NO: 43104 - protein, 11 aa, Artificial Sequence
  source: /note="Description of Artificial Sequence: Synthetic peptide"
AQKNGIVDSAQ

SEQ ID NO: 43105 - protein, 11 aa, Artificial Sequence
  source: /note="Description of Artificial Sequence: Synthetic peptide"
AQKSGTPALAQ

SEQ ID NO: 43106 - protein, 11 aa, Artificial Sequence
  source: /note="Description of Artificial Sequence: Synthetic peptide"
AQKSTQSPDAQ

SEQ ID NO: 43107 - protein, 11 aa, Artificial Sequence
  source: /note="Description of Artificial Sequence: Synthetic peptide"
AQKVATHPVAQ

SEQ ID NO: 43108 - protein, 11 aa, Artificial Sequence
  source: /note="Description of Artificial Sequence: Synthetic peptide"
AQLAGVSHAAQ

SEQ ID NO: 43109 - protein, 11 aa, Artificial Sequence
  source: /note="Description of Artificial Sequence: Synthetic peptide"
AQLKNSDSYAQ

SEQ ID NO: 43110 - protein, 11 aa, Artificial Sequence
  source: /note="Description of Artificial Sequence: Synthetic peptide"
AQLLGGSDRAQ

SEQ ID NO: 43111 - protein, 11 aa, Artificial Sequence
  source: /note="Description of Artificial Sequence: Synthetic peptide"
AQLMGSGEGAQ

SEQ ID NO: 43112 - protein, 11 aa, Artificial Sequence
  source: /note="Description of Artificial Sequence: Synthetic peptide"
AQLQGAALPAQ

SEQ ID NO: 43113 - protein, 11 aa, Artificial Sequence
  source: /note="Description of Artificial Sequence: Synthetic peptide"
AQMQVNGNGAQ

SEQ ID NO: 43114 - protein, 11 aa, Artificial Sequence
  source: /note="Description of Artificial Sequence: Synthetic peptide"
AQMSMSVGKAQ

SEQ ID NO: 43115 - protein, 11 aa, Artificial Sequence
  source: /note="Description of Artificial Sequence: Synthetic peptide"
AQNAVNGRPAQ

SEQ ID NO: 43116 - protein, 11 aa, Artificial Sequence
  source: /note="Description of Artificial Sequence: Synthetic peptide"
AQNEGHSAKAQ

SEQ ID NO: 43117 - protein, 11 aa, Artificial Sequence
  source: /note="Description of Artificial Sequence: Synthetic peptide"
AQNGFNRSAAQ

SEQ ID NO: 43118 - protein, 11 aa, Artificial Sequence
  source: /note="Description of Artificial Sequence: Synthetic peptide"
AQNNGVHLRAQ

SEQ ID NO: 43119 - protein, 11 aa, Artificial Sequence
  source: /note="Description of Artificial Sequence: Synthetic peptide"
AQNPKSIPGAQ

SEQ ID NO: 43120 - protein, 11 aa, Artificial Sequence
  source: /note="Description of Artificial Sequence: Synthetic peptide"
AQNTLSHAKAQ

SEQ ID NO: 43121 - protein, 11 aa, Artificial Sequence
  source: /note="Description of Artificial Sequence: Synthetic peptide"
AQPAVSGGLAQ

SEQ ID NO: 43122 - protein, 11 aa, Artificial Sequence
  source: /note="Description of Artificial Sequence: Synthetic peptide"
AQPEHAVRTAQ

SEQ ID NO: 43123 - protein, 11 aa, Artificial Sequence
  source: /note="Description of Artificial Sequence: Synthetic peptide"
AQPGLDTTRAQ

SEQ ID NO: 43124 - protein, 11 aa, Artificial Sequence
  source: /note="Description of Artificial Sequence: Synthetic peptide"
AQPISTAAYAQ

SEQ ID NO: 43125 - protein, 11 aa, Artificial Sequence
  source: /note="Description of Artificial Sequence: Synthetic peptide"
AQPRPESPSAQ

SEQ ID NO: 43126 - protein, 11 aa, Artificial Sequence
  source: /note="Description of Artificial Sequence: Synthetic peptide"
AQPTRSVTEAQ

SEQ ID NO: 43127 - protein, 11 aa, Artificial Sequence
  source: /note="Description of Artificial Sequence: Synthetic peptide"
AQQHKTAQVAQ

SEQ ID NO: 43128 - protein, 11 aa, Artificial Sequence
  source: /note="Description of Artificial Sequence: Synthetic peptide"
AQQTGVLAAAQ

SEQ ID NO: 43129 - protein, 11 aa, Artificial Sequence
  source: /note="Description of Artificial Sequence: Synthetic peptide"
AQQTVSMMSAQ

SEQ ID NO: 43130 - protein, 11 aa, Artificial Sequence
  source: /note="Description of Artificial Sequence: Synthetic peptide"
AQSASSNQPAQ

SEQ ID NO: 43131 - protein, 11 aa, Artificial Sequence
  source: /note="Description of Artificial Sequence: Synthetic peptide"
AQSGGGPVRAQ

SEQ ID NO: 43132 - protein, 11 aa, Artificial Sequence
  source: /note="Description of Artificial Sequence: Synthetic peptide"
AQSGLQPKMAQ

SEQ ID NO: 43133 - protein, 11 aa, Artificial Sequence
  source: /note="Description of Artificial Sequence: Synthetic peptide"
AQSGTLQRAAQ

SEQ ID NO: 43134 - protein, 11 aa, Artificial Sequence
  source: /note="Description of Artificial Sequence: Synthetic peptide"
AQSINVSSAAQ

SEQ ID NO: 43135 - protein, 11 aa, Artificial Sequence
  source: /note="Description of Artificial Sequence: Synthetic peptide"
AQSKSANLPAQ

SEQ ID NO: 43136 - protein, 11 aa, Artificial Sequence
  source: /note="Description of Artificial Sequence: Synthetic peptide"
AQSSGDSTKAQ

SEQ ID NO: 43137 - protein, 11 aa, Artificial Sequence
  source: /note="Description of Artificial Sequence: Synthetic peptide"
AQSSGQGQVAQ

SEQ ID NO: 43138 - protein, 11 aa, Artificial Sequence
  source: /note="Description of Artificial Sequence: Synthetic peptide"
AQSTTLQNVAQ

SEQ ID NO: 43139 - protein, 11 aa, Artificial Sequence
  source: /note="Description of Artificial Sequence: Synthetic peptide"
AQTETPVSRAQ

SEQ ID NO: 43140 - protein, 11 aa, Artificial Sequence
  source: /note="Description of Artificial Sequence: Synthetic peptide"
AQTGAASRLAQ

SEQ ID NO: 43141 - protein, 11 aa, Artificial Sequence
  source: /note="Description of Artificial Sequence: Synthetic peptide"
AQTINPAVRAQ

SEQ ID NO: 43142 - protein, 11 aa, Artificial Sequence
  source: /note="Description of Artificial Sequence: Synthetic peptide"
AQTPSSASSAQ

SEQ ID NO: 43143 - protein, 11 aa, Artificial Sequence
  source: /note="Description of Artificial Sequence: Synthetic peptide"
AQTSHTMSFAQ

SEQ ID NO: 43144 - protein, 11 aa, Artificial Sequence
  source: /note="Description of Artificial Sequence: Synthetic peptide"
AQTSTQSVNAQ

SEQ ID NO: 43145 - protein, 11 aa, Artificial Sequence
  source: /note="Description of Artificial Sequence: Synthetic peptide"
AQVHAGAEVAQ

SEQ ID NO: 43146 - protein, 11 aa, Artificial Sequence
  source: /note="Description of Artificial Sequence: Synthetic peptide"
AQVKDGLTSAQ

SEQ ID NO: 43147 - protein, 11 aa, Artificial Sequence
  source: /note="Description of Artificial Sequence: Synthetic peptide"
AQVNNQSAKAQ

SEQ ID NO: 43148 - protein, 11 aa, Artificial Sequence
  source: /note="Description of Artificial Sequence: Synthetic peptide"
AQVRDGIPPAQ

SEQ ID NO: 43149 - protein, 11 aa, Artificial Sequence
  source: /note="Description of Artificial Sequence: Synthetic peptide"
AQVSPGMAGAQ

SEQ ID NO: 43150 - protein, 11 aa, Artificial Sequence
  source: /note="Description of Artificial Sequence: Synthetic peptide"
AQVVNELRGAQ

SEQ ID NO: 43151 - protein, 11 aa, Artificial Sequence
  source: /note="Description of Artificial Sequence: Synthetic peptide"
AQVVPHNGLAQ

SEQ ID NO: 43152 - protein, 11 aa, Artificial Sequence
  source: /note="Description of Artificial Sequence: Synthetic peptide"
AQHAKIMYDAQ

SEQ ID NO: 43153 - protein, 11 aa, Artificial Sequence
  source: /note="Description of Artificial Sequence: Synthetic peptide"
AQAVSSQVSAQ

SEQ ID NO: 43154 - protein, 11 aa, Artificial Sequence
  source: /note="Description of Artificial Sequence: Synthetic peptide"
AQGLSVVNMAQ

SEQ ID NO: 43155 - protein, 11 aa, Artificial Sequence
  source: /note="Description of Artificial Sequence: Synthetic peptide"
AQRSMPTLSAQ

SEQ ID NO: 43156 - protein, 11 aa, Artificial Sequence
  source: /note="Description of Artificial Sequence: Synthetic peptide"
AQPVNTQRVAQ

SEQ ID NO: 43157 - protein, 11 aa, Artificial Sequence
  source: /note="Description of Artificial Sequence: Synthetic peptide"
AQVSGDGSRAQ

SEQ ID NO: 43158 - protein, 11 aa, Artificial Sequence
  source: /note="Description of Artificial Sequence: Synthetic peptide"
AQDLNNRPYAQ

SEQ ID NO: 43159 - protein, 11 aa, Artificial Sequence
  source: /note="Description of Artificial Sequence: Synthetic peptide"
AQLSESSHGAQ

SEQ ID NO: 43160 - protein, 11 aa, Artificial Sequence
  source: /note="Description of Artificial Sequence: Synthetic peptide"
AQVSNNSTLAQ

SEQ ID NO: 43161 - protein, 11 aa, Artificial Sequence
  source: /note="Description of Artificial Sequence: Synthetic peptide"
AQLQGAALQAQ

SEQ ID NO: 43162 - protein, 11 aa, Artificial Sequence
  source: /note="Description of Artificial Sequence: Synthetic peptide"
AQLRMPSNVAQ

SEQ ID NO: 43163 - protein, 11 aa, Artificial Sequence
  source: /note="Description of Artificial Sequence: Synthetic peptide"
AQMPTSQPVAQ

SEQ ID NO: 43164 - protein, 11 aa, Artificial Sequence
  source: /note="Description of Artificial Sequence: Synthetic peptide"
AQYETQLSHAQ

SEQ ID NO: 43165 - protein, 11 aa, Artificial Sequence
  source: /note="Description of Artificial Sequence: Synthetic peptide"
AQTRIQPLPAQ

SEQ ID NO: 43166 - protein, 11 aa, Artificial Sequence
  source: /note="Description of Artificial Sequence: Synthetic peptide"
AQPAPSGNTAQ

SEQ ID NO: 43167 - protein, 11 aa, Artificial Sequence
  source: /note="Description of Artificial Sequence: Synthetic peptide"
AQELRMYSAAQ

SEQ ID NO: 43168 - protein, 11 aa, Artificial Sequence
  source: /note="Description of Artificial Sequence: Synthetic peptide"
AQKESVPISAQ

SEQ ID NO: 43169 - protein, 11 aa, Artificial Sequence
  source: /note="Description of Artificial Sequence: Synthetic peptide"
AQVREVTLVAQ

SEQ ID NO: 43170 - protein, 11 aa, Artificial Sequence
  source: /note="Description of Artificial Sequence: Synthetic peptide"
AQISSQLALAQ

SEQ ID NO: 43171 - protein, 11 aa, Artificial Sequence
  source: /note="Description of Artificial Sequence: Synthetic peptide"
AQSLGLTQHAQ

SEQ ID NO: 43172 - protein, 11 aa, Artificial Sequence
  source: /note="Description of Artificial Sequence: Synthetic peptide"
AQDLRMYSAAQ

SEQ ID NO: 43173 - protein, 11 aa, Artificial Sequence
  source: /note="Description of Artificial Sequence: Synthetic peptide"
AQTVAASRLAQ

SEQ ID NO: 43174 - protein, 11 aa, Artificial Sequence
  source: /note="Description of Artificial Sequence: Synthetic peptide"
AQEVSVNVSAQ

SEQ ID NO: 43175 - protein, 11 aa, Artificial Sequence
  source: /note="Description of Artificial Sequence: Synthetic peptide"
AQLNALATTAQ

SEQ ID NO: 43176 - protein, 11 aa, Artificial Sequence
  source: /note="Description of Artificial Sequence: Synthetic peptide"
AQGTSLKGPAQ

SEQ ID NO: 43177 - protein, 11 aa, Artificial Sequence
  source: /note="Description of Artificial Sequence: Synthetic peptide"
AQFPSTGVRAQ

SEQ ID NO: 43178 - protein, 11 aa, Artificial Sequence
  source: /note="Description of Artificial Sequence: Synthetic peptide"
AQDHASESLAQ

SEQ ID NO: 43179 - protein, 11 aa, Artificial Sequence
  source: /note="Description of Artificial Sequence: Synthetic peptide"
AQSELSRHLAQ

SEQ ID NO: 43180 - protein, 11 aa, Artificial Sequence
  source: /note="Description of Artificial Sequence: Synthetic peptide"
AQNVFNRSAAQ

SEQ ID NO: 43181 - protein, 11 aa, Artificial Sequence
  source: /note="Description of Artificial Sequence: Synthetic peptide"
AQAQIATRMAQ

SEQ ID NO: 43182 - protein, 11 aa, Artificial Sequence
  source: /note="Description of Artificial Sequence: Synthetic peptide"
AQTQMVTPAAQ

SEQ ID NO: 43183 - protein, 11 aa, Artificial Sequence
  source: /note="Description of Artificial Sequence: Synthetic peptide"
AQRSSDSNCAQ

SEQ ID NO: 43184 - protein, 11 aa, Artificial Sequence
  source: /note="Description of Artificial Sequence: Synthetic peptide"
AQTYGSEGSAQ

SEQ ID NO: 43185 - protein, 11 aa, Artificial Sequence
  source: /note="Description of Artificial Sequence: Synthetic peptide"
AQINVANRSSQ

SEQ ID NO: 43186 - protein, 11 aa, Artificial Sequence
  source: /note="Description of Artificial Sequence: Synthetic peptide"
AQLPTSPLDAQ

SEQ ID NO: 43187 - protein, 11 aa, Artificial Sequence
  source: /note="Description of Artificial Sequence: Synthetic peptide"
AQAKGGINGAQ

SEQ ID NO: 43188 - protein, 11 aa, Artificial Sequence
  source: /note="Description of Artificial Sequence: Synthetic peptide"
AQQTVSMMIAQ

SEQ ID NO: 43189 - protein, 11 aa, Artificial Sequence
  source: /note="Description of Artificial Sequence: Synthetic peptide"
AQVHVGAEVAQ

SEQ ID NO: 43190 - protein, 11 aa, Artificial Sequence
  source: /note="Description of Artificial Sequence: Synthetic peptide"
AQESNLAALAQ

SEQ ID NO: 43191 - protein, 11 aa, Artificial Sequence
  source: /note="Description of Artificial Sequence: Synthetic peptide"
AHVHAGAEVAQ

SEQ ID NO: 43192 - protein, 11 aa, Artificial Sequence
  source: /note="Description of Artificial Sequence: Synthetic peptide"
AQPALKTDPAQ

SEQ ID NO: 43193 - protein, 11 aa, Artificial Sequence
  source: /note="Description of Artificial Sequence: Synthetic peptide"
AQSLTTVGRAQ

SEQ ID NO: 43194 - protein, 11 aa, Artificial Sequence
  source: /note="Description of Artificial Sequence: Synthetic peptide"
AQDSRSNITAQ

SEQ ID NO: 43195 - protein, 11 aa, Artificial Sequence
  source: /note="Description of Artificial Sequence: Synthetic peptide"
AQPRGQDGYAQ

SEQ ID NO: 43196 - protein, 11 aa, Artificial Sequence
  source: /note="Description of Artificial Sequence: Synthetic peptide"
AQELNTSKDAQ

SEQ ID NO: 43197 - protein, 11 aa, Artificial Sequence
  source: /note="Description of Artificial Sequence: Synthetic peptide"
AQYLGASQLAQ

SEQ ID NO: 43198 - protein, 11 aa, Artificial Sequence
  source: /note="Description of Artificial Sequence: Synthetic peptide"
AQYESRMPNAQ

SEQ ID NO: 43199 - protein, 11 aa, Artificial Sequence
  source: /note="Description of Artificial Sequence: Synthetic peptide"
AQRGTQNHLAQ

SEQ ID NO: 43200 - protein, 11 aa, Artificial Sequence
  source: /note="Description of Artificial Sequence: Synthetic peptide"
AQLTASHILAQ

SEQ ID NO: 43201 - protein, 11 aa, Artificial Sequence
  source: /note="Description of Artificial Sequence: Synthetic peptide"
AQYLSDKRTAQ

SEQ ID NO: 43202 - protein, 11 aa, Artificial Sequence
  source: /note="Description of Artificial Sequence: Synthetic peptide"
AKELNTSKDAQ

SEQ ID NO: 43203 - protein, 11 aa, Artificial Sequence
  source: /note="Description of Artificial Sequence: Synthetic peptide"
AQFSTPSTTAQ

SEQ ID NO: 43204 - protein, 11 aa, Artificial Sequence
  source: /note="Description of Artificial Sequence: Synthetic peptide"
AQNVNSHMGAQ

SEQ ID NO: 43205 - protein, 11 aa, Artificial Sequence
  source: /note="Description of Artificial Sequence: Synthetic peptide"
AQMPVSTISAQ

SEQ ID NO: 43206 - protein, 11 aa, Artificial Sequence
  source: /note="Description of Artificial Sequence: Synthetic peptide"
AQSIGQGQVAQ

SEQ ID NO: 43207 - protein, 11 aa, Artificial Sequence
  source: /note="Description of Artificial Sequence: Synthetic peptide"
AQVLREQSLAQ

SEQ ID NO: 43208 - protein, 11 aa, Artificial Sequence
  source: /note="Description of Artificial Sequence: Synthetic peptide"
AQRLAANNVAQ

SEQ ID NO: 43209 - protein, 11 aa, Artificial Sequence
  source: /note="Description of Artificial Sequence: Synthetic peptide"
AQNRVSESVAQ

SEQ ID NO: 43210 - protein, 11 aa, Artificial Sequence
  source: /note="Description of Artificial Sequence: Synthetic peptide"
AQQHNGAQLAQ

SEQ ID NO: 43211 - protein, 11 aa, Artificial Sequence
  source: /note="Description of Artificial Sequence: Synthetic peptide"
AQASRSLSTAQ

SEQ ID NO: 43212 - protein, 11 aa, Artificial Sequence
  source: /note="Description of Artificial Sequence: Synthetic peptide"
AQFTSGNLTAQ

SEQ ID NO: 43213 - protein, 11 aa, Artificial Sequence
  source: /note="Description of Artificial Sequence: Synthetic peptide"
AQTVSNRTLAQ

SEQ ID NO: 43214 - protein, 11 aa, Artificial Sequence
  source: /note="Description of Artificial Sequence: Synthetic peptide"
AQYDHSGTKAQ

SEQ ID NO: 43215 - protein, 11 aa, Artificial Sequence
  source: /note="Description of Artificial Sequence: Synthetic peptide"
AQNVTSVTAAQ

SEQ ID NO: 43216 - protein, 11 aa, Artificial Sequence
  source: /note="Description of Artificial Sequence: Synthetic peptide"
AQSQLAGAAAQ

SEQ ID NO: 43217 - protein, 11 aa, Artificial Sequence
  source: /note="Description of Artificial Sequence: Synthetic peptide"
AQSLRTPMLAQ

SEQ ID NO: 43218 - protein, 11 aa, Artificial Sequence
  source: /note="Description of Artificial Sequence: Synthetic peptide"
AQTMRSSVTAQ

SEQ ID NO: 43219 - protein, 11 aa, Artificial Sequence
  source: /note="Description of Artificial Sequence: Synthetic peptide"
AQMISSSLAAQ

SEQ ID NO: 43220 - protein, 11 aa, Artificial Sequence
  source: /note="Description of Artificial Sequence: Synthetic peptide"
AQSRMPLPEAQ

SEQ ID NO: 43221 - protein, 11 aa, Artificial Sequence
  source: /note="Description of Artificial Sequence: Synthetic peptide"
AQARQSSALAQ

SEQ ID NO: 43222 - protein, 11 aa, Artificial Sequence
  source: /note="Description of Artificial Sequence: Synthetic peptide"
AQAITGSTYAQ

SEQ ID NO: 43223 - protein, 11 aa, Artificial Sequence
  source: /note="Description of Artificial Sequence: Synthetic peptide"
AQPVLDTTRAQ

SEQ ID NO: 43224 - protein, 11 aa, Artificial Sequence
  source: /note="Description of Artificial Sequence: Synthetic peptide"
AQPNGLSQPAQ

SEQ ID NO: 43225 - protein, 11 aa, Artificial Sequence
  source: /note="Description of Artificial Sequence: Synthetic peptide"
AQYSALNLSAQ

SEQ ID NO: 43226 - protein, 11 aa, Artificial Sequence
  source: /note="Description of Artificial Sequence: Synthetic peptide"
AQEHASRNPAQ

SEQ ID NO: 43227 - protein, 11 aa, Artificial Sequence
  source: /note="Description of Artificial Sequence: Synthetic peptide"
AQGITHQTVAQ

SEQ ID NO: 43228 - protein, 11 aa, Artificial Sequence
  source: /note="Description of Artificial Sequence: Synthetic peptide"
AQAYGLPQDAQ

SEQ ID NO: 43229 - protein, 11 aa, Artificial Sequence
  source: /note="Description of Artificial Sequence: Synthetic peptide"
AQSTPTPSLAQ

SEQ ID NO: 43230 - protein, 11 aa, Artificial Sequence
  source: /note="Description of Artificial Sequence: Synthetic peptide"
AQSSHLVSSAQ

SEQ ID NO: 43231 - protein, 11 aa, Artificial Sequence
  source: /note="Description of Artificial Sequence: Synthetic peptide"
AQIFQGMPNAQ

SEQ ID NO: 43232 - protein, 11 aa, Artificial Sequence
  source: /note="Description of Artificial Sequence: Synthetic peptide"
AQMQTARTLAQ

SEQ ID NO: 43233 - protein, 11 aa, Artificial Sequence
  source: /note="Description of Artificial Sequence: Synthetic peptide"
AQYTPRNAPAQ

SEQ ID NO: 43234 - protein, 11 aa, Artificial Sequence
  source: /note="Description of Artificial Sequence: Synthetic peptide"
AQGFSTGTNAQ

SEQ ID NO: 43235 - protein, 11 aa, Artificial Sequence
  source: /note="Description of Artificial Sequence: Synthetic peptide"
AQLQYTPSRAQ

SEQ ID NO: 43236 - protein, 11 aa, Artificial Sequence
  source: /note="Description of Artificial Sequence: Synthetic peptide"
AQAVRSTSAAQ

SEQ ID NO: 43237 - protein, 11 aa, Artificial Sequence
  source: /note="Description of Artificial Sequence: Synthetic peptide"
AQTEVSIRQAQ

SEQ ID NO: 43238 - protein, 11 aa, Artificial Sequence
  source: /note="Description of Artificial Sequence: Synthetic peptide"
AQYGVQSATAQ

SEQ ID NO: 43239 - protein, 11 aa, Artificial Sequence
  source: /note="Description of Artificial Sequence: Synthetic peptide"
AQASTGSTYAQ

SEQ ID NO: 43240 - protein, 11 aa, Artificial Sequence
  source: /note="Description of Artificial Sequence: Synthetic peptide"
AQNTSSKDPAQ

SEQ ID NO: 43241 - protein, 11 aa, Artificial Sequence
  source: /note="Description of Artificial Sequence: Synthetic peptide"
AQAGSQGALAQ

SEQ ID NO: 43242 - protein, 11 aa, Artificial Sequence
  source: /note="Description of Artificial Sequence: Synthetic peptide"
AQLTRSELSAQ

SEQ ID NO: 43243 - protein, 11 aa, Artificial Sequence
  source: /note="Description of Artificial Sequence: Synthetic peptide"
AQFVSGSNAAQ

SEQ ID NO: 43244 - protein, 11 aa, Artificial Sequence
  source: /note="Description of Artificial Sequence: Synthetic peptide"
AQLTTSYPSAQ

SEQ ID NO: 43245 - protein, 11 aa, Artificial Sequence
  source: /note="Description of Artificial Sequence: Synthetic peptide"
AQSSVAIQLAQ

SEQ ID NO: 43246 - protein, 11 aa, Artificial Sequence
  source: /note="Description of Artificial Sequence: Synthetic peptide"
AQFSTSLSLAQ

SEQ ID NO: 43247 - protein, 11 aa, Artificial Sequence
  source: /note="Description of Artificial Sequence: Synthetic peptide"
AQKNLHDTTAQ

SEQ ID NO: 43248 - protein, 11 aa, Artificial Sequence
  source: /note="Description of Artificial Sequence: Synthetic peptide"
AQASISAGIAQ

SEQ ID NO: 43249 - protein, 11 aa, Artificial Sequence
  source: /note="Description of Artificial Sequence: Synthetic peptide"
AQRVSNHDGAQ

SEQ ID NO: 43250 - protein, 11 aa, Artificial Sequence
  source: /note="Description of Artificial Sequence: Synthetic peptide"
AQESNLAARAQ

SEQ ID NO: 43251 - protein, 11 aa, Artificial Sequence
  source: /note="Description of Artificial Sequence: Synthetic peptide"
AQLNAPQSSAQ

SEQ ID NO: 43252 - protein, 11 aa, Artificial Sequence
  source: /note="Description of Artificial Sequence: Synthetic peptide"
AQSVGMHGDAQ

SEQ ID NO: 43253 - protein, 11 aa, Artificial Sequence
  source: /note="Description of Artificial Sequence: Synthetic peptide"
AQNTTRPTPAQ

SEQ ID NO: 43254 - protein, 11 aa, Artificial Sequence
  source: /note="Description of Artificial Sequence: Synthetic peptide"
AQIRQAQGAAQ

SEQ ID NO: 43255 - protein, 11 aa, Artificial Sequence
  source: /note="Description of Artificial Sequence: Synthetic peptide"
AQPTNFGTAAQ

SEQ ID NO: 43256 - protein, 11 aa, Artificial Sequence
  source: /note="Description of Artificial Sequence: Synthetic peptide"
AQADFPRQSAQ

SEQ ID NO: 43257 - protein, 11 aa, Artificial Sequence
  source: /note="Description of Artificial Sequence: Synthetic peptide"
AQNGNSHMGAQ

SEQ ID NO: 43258 - protein, 11 aa, Artificial Sequence
  source: /note="Description of Artificial Sequence: Synthetic peptide"
AQPREQSSPAQ

SEQ ID NO: 43259 - protein, 11 aa, Artificial Sequence
  source: /note="Description of Artificial Sequence: Synthetic peptide"
AQEASGNARAQ

SEQ ID NO: 43260 - protein, 11 aa, Artificial Sequence
  source: /note="Description of Artificial Sequence: Synthetic peptide"
AQEAQSKRPAQ

SEQ ID NO: 43261 - protein, 11 aa, Artificial Sequence
  source: /note="Description of Artificial Sequence: Synthetic peptide"
AQSSSNNVRAQ

SEQ ID NO: 43262 - protein, 11 aa, Artificial Sequence
  source: /note="Description of Artificial Sequence: Synthetic peptide"
AQSPSKGAVAQ

SEQ ID NO: 43263 - protein, 11 aa, Artificial Sequence
  source: /note="Description of Artificial Sequence: Synthetic peptide"
AQMLTTSKGAQ

SEQ ID NO: 43264 - protein, 11 aa, Artificial Sequence
  source: /note="Description of Artificial Sequence: Synthetic peptide"
AQLEPSSPRAQ

SEQ ID NO: 43265 - protein, 11 aa, Artificial Sequence
  source: /note="Description of Artificial Sequence: Synthetic peptide"
AQMTGPITNAQ

SEQ ID NO: 43266 - protein, 11 aa, Artificial Sequence
  source: /note="Description of Artificial Sequence: Synthetic peptide"
AQSPNNTTGAQ

SEQ ID NO: 43267 - protein, 11 aa, Artificial Sequence
  source: /note="Description of Artificial Sequence: Synthetic peptide"
AQSSGGRTVAQ

SEQ ID NO: 43268 - protein, 11 aa, Artificial Sequence
  source: /note="Description of Artificial Sequence: Synthetic peptide"
AQVNVTNQSAQ

SEQ ID NO: 43269 - protein, 11 aa, Artificial Sequence
  source: /note="Description of Artificial Sequence: Synthetic peptide"
AQTSGTAMAAQ

SEQ ID NO: 43270 - protein, 11 aa, Artificial Sequence
  source: /note="Description of Artificial Sequence: Synthetic peptide"
AQSSMALSEAQ

SEQ ID NO: 43271 - protein, 11 aa, Artificial Sequence
  source: /note="Description of Artificial Sequence: Synthetic peptide"
AQPVNTQRVAE

SEQ ID NO: 43272 - protein, 11 aa, Artificial Sequence
  source: /note="Description of Artificial Sequence: Synthetic peptide"
AQFVSGSHAAQ

SEQ ID NO: 43273 - protein, 11 aa, Artificial Sequence
  source: /note="Description of Artificial Sequence: Synthetic peptide"
AQHESMSRLAQ

SEQ ID NO: 43274 - protein, 11 aa, Artificial Sequence
  source: /note="Description of Artificial Sequence: Synthetic peptide"
AQSLGLTQQAQ

SEQ ID NO: 43275 - protein, 11 aa, Artificial Sequence
  source: /note="Description of Artificial Sequence: Synthetic peptide"
AQHFDYSAPAQ

SEQ ID NO: 43276 - protein, 11 aa, Artificial Sequence
  source: /note="Description of Artificial Sequence: Synthetic peptide"
AQDLSTSSRAQ

SEQ ID NO: 43277 - protein, 11 aa, Artificial Sequence
  source: /note="Description of Artificial Sequence: Synthetic peptide"
AQKNALTGPAQ

SEQ ID NO: 43278 - protein, 11 aa, Artificial Sequence
  source: /note="Description of Artificial Sequence: Synthetic peptide"
AQITQMAAQAQ

SEQ ID NO: 43279 - protein, 11 aa, Artificial Sequence
  source: /note="Description of Artificial Sequence: Synthetic peptide"
AQMNAPLMTAQ

SEQ ID NO: 43280 - protein, 11 aa, Artificial Sequence
  source: /note="Description of Artificial Sequence: Synthetic peptide"
AQYGKSNSLAQ

SEQ ID NO: 43281 - protein, 11 aa, Artificial Sequence
  source: /note="Description of Artificial Sequence: Synthetic peptide"
AQHSTPGRAAQ

SEQ ID NO: 43282 - protein, 11 aa, Artificial Sequence
  source: /note="Description of Artificial Sequence: Synthetic peptide"
AQLENARGTAQ

SEQ ID NO: 43283 - protein, 11 aa, Artificial Sequence
  source: /note="Description of Artificial Sequence: Synthetic peptide"
AQQTSTSNAAQ

SEQ ID NO: 43284 - protein, 11 aa, Artificial Sequence
  source: /note="Description of Artificial Sequence: Synthetic peptide"
AQSVLSVNAAQ

SEQ ID NO: 43285 - protein, 11 aa, Artificial Sequence
  source: /note="Description of Artificial Sequence: Synthetic peptide"
AQAAVSSIPAQ

SEQ ID NO: 43286 - protein, 11 aa, Artificial Sequence
  source: /note="Description of Artificial Sequence: Synthetic peptide"
AQVEDVRQLAQ

SEQ ID NO: 43287 - protein, 11 aa, Artificial Sequence
  source: /note="Description of Artificial Sequence: Synthetic peptide"
AQVISGRDAAQ

SEQ ID NO: 43288 - protein, 11 aa, Artificial Sequence
  source: /note="Description of Artificial Sequence: Synthetic peptide"
AQTKSQEVSAQ

SEQ ID NO: 43289 - protein, 11 aa, Artificial Sequence
  source: /note="Description of Artificial Sequence: Synthetic peptide"
AQKPASIPNAQ

SEQ ID NO: 43290 - protein, 11 aa, Artificial Sequence
  source: /note="Description of Artificial Sequence: Synthetic peptide"
AQYAVQSTHAQ

SEQ ID NO: 43291 - protein, 11 aa, Artificial Sequence
  source: /note="Description of Artificial Sequence: Synthetic peptide"
AQSTRTVIPAQ

SEQ ID NO: 43292 - protein, 11 aa, Artificial Sequence
  source: /note="Description of Artificial Sequence: Synthetic peptide"
AQKATGLTSAQ

SEQ ID NO: 43293 - protein, 11 aa, Artificial Sequence
  source: /note="Description of Artificial Sequence: Synthetic peptide"
AQLTNQRSSAQ

SEQ ID NO: 43294 - protein, 11 aa, Artificial Sequence
  source: /note="Description of Artificial Sequence: Synthetic peptide"
AQDHGKSGGAQ

SEQ ID NO: 43295 - protein, 11 aa, Artificial Sequence
  source: /note="Description of Artificial Sequence: Synthetic peptide"
AQVSMNSRGAQ

SEQ ID NO: 43296 - protein, 11 aa, Artificial Sequence
  source: /note="Description of Artificial Sequence: Synthetic peptide"
AQQPSLRRDAQ

SEQ ID NO: 43297 - protein, 11 aa, Artificial Sequence
  source: /note="Description of Artificial Sequence: Synthetic peptide"
AQRSNQNANAQ

SEQ ID NO: 43298 - protein, 11 aa, Artificial Sequence
  source: /note="Description of Artificial Sequence: Synthetic peptide"
AQPGAGVREAQ

SEQ ID NO: 43299 - protein, 11 aa, Artificial Sequence
  source: /note="Description of Artificial Sequence: Synthetic peptide"
AQTGRSDSNAQ

SEQ ID NO: 43300 - protein, 11 aa, Artificial Sequence
  source: /note="Description of Artificial Sequence: Synthetic peptide"
AQSNSALIAAQ

SEQ ID NO: 43301 - protein, 11 aa, Artificial Sequence
  source: /note="Description of Artificial Sequence: Synthetic peptide"
AQPIASVSPAQ

SEQ ID NO: 43302 - protein, 11 aa, Artificial Sequence
  source: /note="Description of Artificial Sequence: Synthetic peptide"
AQHTTNTEVAQ

SEQ ID NO: 43303 - protein, 11 aa, Artificial Sequence
  source: /note="Description of Artificial Sequence: Synthetic peptide"
AQQKSTYSPAQ

SEQ ID NO: 43304 - protein, 11 aa, Artificial Sequence
  source: /note="Description of Artificial Sequence: Synthetic peptide"
AQQTQHTGPAQ

SEQ ID NO: 43305 - protein, 11 aa, Artificial Sequence
  source: /note="Description of Artificial Sequence: Synthetic peptide"
AQMERISIHAQ

SEQ ID NO: 43306 - protein, 11 aa, Artificial Sequence
  source: /note="Description of Artificial Sequence: Synthetic peptide"
AQDSGNKMNAQ

SEQ ID NO: 43307 - protein, 11 aa, Artificial Sequence
  source: /note="Description of Artificial Sequence: Synthetic peptide"
AQSAVHNGVAQ

SEQ ID NO: 43308 - protein, 11 aa, Artificial Sequence
  source: /note="Description of Artificial Sequence: Synthetic peptide"
AQSASLPMAAQ

SEQ ID NO: 43309 - protein, 11 aa, Artificial Sequence
  source: /note="Description of Artificial Sequence: Synthetic peptide"
AQNLASTSPAQ

SEQ ID NO: 43310 - protein, 11 aa, Artificial Sequence
  source: /note="Description of Artificial Sequence: Synthetic peptide"
AQVMHTLDAAQ

SEQ ID NO: 43311 - protein, 11 aa, Artificial Sequence
  source: /note="Description of Artificial Sequence: Synthetic peptide"
AQSQSGGDRAQ

SEQ ID NO: 43312 - protein, 11 aa, Artificial Sequence
  source: /note="Description of Artificial Sequence: Synthetic peptide"
AQVATIVRSAQ

SEQ ID NO: 43313 - protein, 11 aa, Artificial Sequence
  source: /note="Description of Artificial Sequence: Synthetic peptide"
AQSPQRNSTAQ

SEQ ID NO: 43314 - protein, 11 aa, Artificial Sequence
  source: /note="Description of Artificial Sequence: Synthetic peptide"
AQEVSVNVAAQ

SEQ ID NO: 43315 - protein, 11 aa, Artificial Sequence
  source: /note="Description of Artificial Sequence: Synthetic peptide"
AQTGTPRNDAQ

SEQ ID NO: 43316 - protein, 11 aa, Artificial Sequence
  source: /note="Description of Artificial Sequence: Synthetic peptide"
AQYTDNYGVAQ

SEQ ID NO: 43317 - protein, 11 aa, Artificial Sequence
  source: /note="Description of Artificial Sequence: Synthetic peptide"
AQLDGSPARAQ

SEQ ID NO: 43318 - protein, 11 aa, Artificial Sequence
  source: /note="Description of Artificial Sequence: Synthetic peptide"
AQNGSDASLAQ

SEQ ID NO: 43319 - protein, 11 aa, Artificial Sequence
  source: /note="Description of Artificial Sequence: Synthetic peptide"
AQNVGREQPAQ

SEQ ID NO: 43320 - protein, 11 aa, Artificial Sequence
  source: /note="Description of Artificial Sequence: Synthetic peptide"
AQPPAGNTQAQ

SEQ ID NO: 43321 - protein, 11 aa, Artificial Sequence
  source: /note="Description of Artificial Sequence: Synthetic peptide"
AQVTPHFPSAQ

SEQ ID NO: 43322 - protein, 11 aa, Artificial Sequence
  source: /note="Description of Artificial Sequence: Synthetic peptide"
AQATHAASPAQ

SEQ ID NO: 43323 - protein, 11 aa, Artificial Sequence
  source: /note="Description of Artificial Sequence: Synthetic peptide"
AQSNVKVLAAQ

SEQ ID NO: 43324 - protein, 11 aa, Artificial Sequence
  source: /note="Description of Artificial Sequence: Synthetic peptide"
AQNAAKAVLAQ

SEQ ID NO: 43325 - protein, 11 aa, Artificial Sequence
  source: /note="Description of Artificial Sequence: Synthetic peptide"
AQTDKPHSQAQ

SEQ ID NO: 43326 - protein, 11 aa, Artificial Sequence
  source: /note="Description of Artificial Sequence: Synthetic peptide"
AQSATSNFLAQ

SEQ ID NO: 43327 - protein, 11 aa, Artificial Sequence
  source: /note="Description of Artificial Sequence: Synthetic peptide"
AQNLRAEVVAQ

SEQ ID NO: 43328 - protein, 11 aa, Artificial Sequence
  source: /note="Description of Artificial Sequence: Synthetic peptide"
AQNERSIESAQ

SEQ ID NO: 43329 - protein, 11 aa, Artificial Sequence
  source: /note="Description of Artificial Sequence: Synthetic peptide"
AQYPNDANPAQ

SEQ ID NO: 43330 - protein, 11 aa, Artificial Sequence
  source: /note="Description of Artificial Sequence: Synthetic peptide"
AQASLLSQPAQ

SEQ ID NO: 43331 - protein, 11 aa, Artificial Sequence
  source: /note="Description of Artificial Sequence: Synthetic peptide"
AQEFNTRDAAQ

SEQ ID NO: 43332 - protein, 11 aa, Artificial Sequence
  source: /note="Description of Artificial Sequence: Synthetic peptide"
AQELVSSLGAQ

SEQ ID NO: 43333 - protein, 11 aa, Artificial Sequence
  source: /note="Description of Artificial Sequence: Synthetic peptide"
AQSAQAYTEAQ

SEQ ID NO: 43334 - protein, 11 aa, Artificial Sequence
  source: /note="Description of Artificial Sequence: Synthetic peptide"
AQMSTESHGAQ

SEQ ID NO: 43335 - protein, 11 aa, Artificial Sequence
  source: /note="Description of Artificial Sequence: Synthetic peptide"
AQSQNMSNIAQ

SEQ ID NO: 43336 - protein, 11 aa, Artificial Sequence
  source: /note="Description of Artificial Sequence: Synthetic peptide"
AQVGNDNRSAQ

SEQ ID NO: 43337 - protein, 11 aa, Artificial Sequence
  source: /note="Description of Artificial Sequence: Synthetic peptide"
AQLQSSNNPAQ

SEQ ID NO: 43338 - protein, 11 aa, Artificial Sequence
  source: /note="Description of Artificial Sequence: Synthetic peptide"
AQDSAPLRSAQ

SEQ ID NO: 43339 - protein, 11 aa, Artificial Sequence
  source: /note="Description of Artificial Sequence: Synthetic peptide"
AQMGGTIMSAQ

SEQ ID NO: 43340 - protein, 11 aa, Artificial Sequence
  source: /note="Description of Artificial Sequence: Synthetic peptide"
AQHYTSGAEAQ

SEQ ID NO: 43341 - protein, 11 aa, Artificial Sequence
  source: /note="Description of Artificial Sequence: Synthetic peptide"
AQSVGMNYKAQ

SEQ ID NO: 43342 - DNA, 33 bp, Artificial Sequence
  source: /note="Description of Artificial Sequence: Synthetic oligonucleotide"
ccctcatcagccgtccgaacgtcacttgcccaa

SEQ ID NO: 43343 - DNA, 33 bp, Artificial Sequence
  source: /note="Description of Artificial Sequence: Synthetic oligonucleotide"
ccttcgtctgcggttaggacgtctttggcacag

SEQ ID NO: 43344 - DNA, 33 bp, Artificial Sequence
  source: /note="Description of Artificial Sequence: Synthetic oligonucleotide"
gctcaggctggtcagattcatcataatgctcag

SEQ ID NO: 43345 - DNA, 33 bp, Artificial Sequence
  source: /note="Description of Artificial Sequence: Synthetic oligonucleotide"
gcccaagctggtcagattcatcataatgcacag

SEQ ID NO: 43346 - DNA, 33 bp, Artificial Sequence
  source: /note="Description of Artificial Sequence: Synthetic oligonucleotide"
gcccaagccggctcagacaaggccaaggcccaa

SEQ ID NO: 43347 - DNA, 33 bp, Artificial Sequence
  source: /note="Description of Artificial Sequence: Synthetic oligonucleotide"
gctcaggctggtagtgataaggctaaggctcag

SEQ ID NO: 43348 - DNA, 33 bp, Artificial Sequence
  source: /note="Description of Artificial Sequence: Synthetic oligonucleotide"
gcccaagcgggtagtgataaggctaaggcacag

SEQ ID NO: 43349 - DNA, 33 bp, Artificial Sequence
  source: /note="Description of Artificial Sequence: Synthetic oligonucleotide"
gcccaagcccttaacggcgcccgacttgcccaa

SEQ ID NO: 43350 - DNA, 33 bp, Artificial Sequence
  source: /note="Description of Artificial Sequence: Synthetic oligonucleotide"
gcgcaagcccttaacggcgcccgacttgcccaa

SEQ ID NO: 43351 - DNA, 33 bp, Artificial Sequence
  source: /note="Description of Artificial Sequence: Synthetic oligonucleotide"
gcgcaggcgttgaatggggcgaggttggcgcag

SEQ ID NO: 43352 - DNA, 33 bp, Artificial Sequence
  source: /note="Description of Artificial Sequence: Synthetic oligonucleotide"
gcccaagcttcggatcgtgcgctgcctgcacag

SEQ ID NO: 43353 - DNA, 33 bp, Artificial Sequence
  source: /note="Description of Artificial Sequence: Synthetic oligonucleotide"
gcgcaggcgtcggatagggcgttgccggcgcag

SEQ ID NO: 43354 - DNA, 33 bp, Artificial Sequence
  source: /note="Description of Artificial Sequence: Synthetic oligonucleotide"
gcccaagcgtctgtgcttgctcatcctgcacag

SEQ ID NO: 43355 - DNA, 33 bp, Artificial Sequence
  source: /note="Description of Artificial Sequence: Synthetic oligonucleotide"
gctcaggctagtgttcttgctcatcctgctcag

SEQ ID NO: 43356 - DNA, 33 bp, Artificial Sequence
  source: /note="Description of Artificial Sequence: Synthetic oligonucleotide"
gcacaagcagtaaagggattagacttagcacaa

SEQ ID NO: 43357 - DNA, 33 bp, Artificial Sequence
  source: /note="Description of Artificial Sequence: Synthetic oligonucleotide"
gctcaggctgttaagggtcttgatcttgctcag

SEQ ID NO: 43358 - DNA, 33 bp, Artificial Sequence
  source: /note="Description of Artificial Sequence: Synthetic oligonucleotide"
gcgcaggcggtgaaggggttggatttggcgcag

SEQ ID NO: 43359 - DNA, 33 bp, Artificial Sequence
  source: /note="Description of Artificial Sequence: Synthetic oligonucleotide"
gcccaagccgtcaagggccttgaccttgcccaa

SEQ ID NO: 43360 - DNA, 33 bp, Artificial Sequence
  source: /note="Description of Artificial Sequence: Synthetic oligonucleotide"
gcccaagcggtgaaggggttggatttggcacag

SEQ ID NO: 43361 - DNA, 33 bp, Artificial Sequence
  source: /note="Description of Artificial Sequence: Synthetic oligonucleotide"
gcgcaggatgcgacgagggcgttggcggcgcag

SEQ ID NO: 43362 - DNA, 33 bp, Artificial Sequence
  source: /note="Description of Artificial Sequence: Synthetic oligonucleotide"
gcacaagacgcaactagggcattagcagcacaa

SEQ ID NO: 43363 - DNA, 33 bp, Artificial Sequence
  source: /note="Description of Artificial Sequence: Synthetic oligonucleotide"
gctcaggatactcaggttgctcgtagtgctcag

SEQ ID NO: 43364 - DNA, 33 bp, Artificial Sequence
  source: /note="Description of Artificial Sequence: Synthetic oligonucleotide"
gcgcaggatacgcaggtggcgaggtcggcgcag

SEQ ID NO: 43365 - DNA, 33 bp, Artificial Sequence
  source: /note="Description of Artificial Sequence: Synthetic oligonucleotide"
gcccaagacacgcgaggcatcatggccgcccaa

SEQ ID NO: 43366 - DNA, 33 bp, Artificial Sequence
  source: /note="Description of Artificial Sequence: Synthetic oligonucleotide"
gctcaggatactcgtggtattatggctgctcag

SEQ ID NO: 43367 - DNA, 33 bp, Artificial Sequence
  source: /note="Description of Artificial Sequence: Synthetic oligonucleotide"
gcacaagaaatgaggggattagcaatagcacaa

SEQ ID NO: 43368 - DNA, 33 bp, Artificial Sequence
  source: /note="Description of Artificial Sequence: Synthetic oligonucleotide"
gctcaggagatgcgtggtcttgctattgctcag

SEQ ID NO: 43369 - DNA, 33 bp, Artificial Sequence
  source: /note="Description of Artificial Sequence: Synthetic oligonucleotide"
gcgcagtttgcggggtcgaatgcggcggcgcag

SEQ ID NO: 43370 - DNA, 33 bp, Artificial Sequence
  source: /note="Description of Artificial Sequence: Synthetic oligonucleotide"
gcacaattcgcaggaagcaacgcagcagcacaa

SEQ ID NO: 43371 - DNA, 33 bp, Artificial Sequence
  source: /note="Description of Artificial Sequence: Synthetic oligonucleotide"
gcccaatttgcggggtctaatgctgctgcacag

SEQ ID NO: 43372 - DNA, 33 bp, Artificial Sequence
  source: /note="Description of Artificial Sequence: Synthetic oligonucleotide"
gcgcagggtgctgatcttcgtaatcctgctcag

SEQ ID NO: 43373 - DNA, 33 bp, Artificial Sequence
  source: /note="Description of Artificial Sequence: Synthetic oligonucleotide"
gcgcagggggcggatttgaggaatccggcgcag

SEQ ID NO: 43374 - DNA, 33 bp, Artificial Sequence
  source: /note="Description of Artificial Sequence: Synthetic oligonucleotide"
gcccaaggcttttcaaaccatgaccccgcccaa

SEQ ID NO: 43375 - DNA, 33 bp, Artificial Sequence
  source: /note="Description of Artificial Sequence: Synthetic oligonucleotide"
gcccaagggttttcgaatcatgatcctgcacag

SEQ ID NO: 43376 - DNA, 33 bp, Artificial Sequence
  source: /note="Description of Artificial Sequence: Synthetic oligonucleotide"
gcccaaggtctgactgctactgttccggcacag

SEQ ID NO: 43377 - DNA, 33 bp, Artificial Sequence
  source: /note="Description of Artificial Sequence: Synthetic oligonucleotide"
gctcagggtcttactgctactgttcctgctcag

SEQ ID NO: 43378 - DNA, 33 bp, Artificial Sequence
  source: /note="Description of Artificial Sequence: Synthetic oligonucleotide"
gcccaaggtccgacgtcggatcggcaggcacag

SEQ ID NO: 43379 - DNA, 33 bp, Artificial Sequence
  source: /note="Description of Artificial Sequence: Synthetic oligonucleotide"
gcccaagggccgacgtcggatcggcaggcacag

SEQ ID NO: 43380 - DNA, 33 bp, Artificial Sequence
  source: /note="Description of Artificial Sequence: Synthetic oligonucleotide"
gcgcaggggaggatggattcgaggccggcgcag

SEQ ID NO: 43381 - DNA, 33 bp, Artificial Sequence
  source: /note="Description of Artificial Sequence: Synthetic oligonucleotide"
gcccaaggtcgtatggatagtcggcctgcacag

SEQ ID NO: 43382 - DNA, 33 bp, Artificial Sequence
  source: /note="Description of Artificial Sequence: Synthetic oligonucleotide"
gctcagggtagtagtcctcaggctactgctcag

SEQ ID NO: 43383 - DNA, 33 bp, Artificial Sequence
  source: /note="Description of Artificial Sequence: Synthetic oligonucleotide"
gcgcaggggtcgtcgccgcaggcgacggcgcag

SEQ ID NO: 43384 - DNA, 33 bp, Artificial Sequence
  source: /note="Description of Artificial Sequence: Synthetic oligonucleotide"
gcccaacatgccaagatcacgtatgacgcccaa

SEQ ID NO: 43385 - DNA, 33 bp, Artificial Sequence
  source: /note="Description of Artificial Sequence: Synthetic oligonucleotide"
gctcagcatgctaagattacttatgatgctcag

SEQ ID NO: 43386 - DNA, 33 bp, Artificial Sequence
  source: /note="Description of Artificial Sequence: Synthetic oligonucleotide"
gcgcagattgcggattcgaggaattcggcgcag

SEQ ID NO: 43387 - DNA, 33 bp, Artificial Sequence
  source: /note="Description of Artificial Sequence: Synthetic oligonucleotide"
gcccaaatcgccgactcacgaaactcagcccaa

SEQ ID NO: 43388 - DNA, 33 bp, Artificial Sequence
  source: /note="Description of Artificial Sequence: Synthetic oligonucleotide"
gcccaaatcaacgtcgccaaccgatcagcccaa

SEQ ID NO: 43389 - DNA, 33 bp, Artificial Sequence
  source: /note="Description of Artificial Sequence: Synthetic oligonucleotide"
gcccaaattaatgttgctaataggtctgcacag

SEQ ID NO: 43390 - DNA, 33 bp, Artificial Sequence
  source: /note="Description of Artificial Sequence: Synthetic oligonucleotide"
gcgcagattaatgtggcgaataggtcggcgcag

SEQ ID NO: 43391 - DNA, 33 bp, Artificial Sequence
  source: /note="Description of Artificial Sequence: Synthetic oligonucleotide"
gctcagattcgtagtactaataatagtgctcag

SEQ ID NO: 43392 - DNA, 33 bp, Artificial Sequence
  source: /note="Description of Artificial Sequence: Synthetic oligonucleotide"
gcacaaataaggagcactaacaacagcgcacaa

SEQ ID NO: 43393 - DNA, 33 bp, Artificial Sequence
  source: /note="Description of Artificial Sequence: Synthetic oligonucleotide"
gctcagaagaatgggattgtggattcggcgcag

SEQ ID NO: 43394 - DNA, 33 bp, Artificial Sequence
  source: /note="Description of Artificial Sequence: Synthetic oligonucleotide"
gcacaaaagaacggaatagtagacagcgcacaa

SEQ ID NO: 43395 - DNA, 33 bp, Artificial Sequence
  source: /note="Description of Artificial Sequence: Synthetic oligonucleotide"
gcccaaaagaatggtattgtggattcggcacag

SEQ ID NO: 43396 - DNA, 33 bp, Artificial Sequence
  source: /note="Description of Artificial Sequence: Synthetic oligonucleotide"
gcgcagaagtcggggactccggcgttggcgcag

SEQ ID NO: 43397 - DNA, 33 bp, Artificial Sequence
  source: /note="Description of Artificial Sequence: Synthetic oligonucleotide"
gcccaaaagtcaggcacgcccgcccttgcccaa

SEQ ID NO: 43398 - DNA, 33 bp, Artificial Sequence
  source: /note="Description of Artificial Sequence: Synthetic oligonucleotide"
gcccaaaagtcgacgcagagtcctgatgcacag

SEQ ID NO: 43399 - DNA, 33 bp, Artificial Sequence
  source: /note="Description of Artificial Sequence: Synthetic oligonucleotide"
gctcagaagagtactcagagtcctgatgctcag

SEQ ID NO: 43400 - DNA, 33 bp, Artificial Sequence
  source: /note="Description of Artificial Sequence: Synthetic oligonucleotide"
gcacaaaaggtagcaactcacccagtagcacaa

SEQ ID NO: 43401 - DNA, 33 bp, Artificial Sequence
  source: /note="Description of Artificial Sequence: Synthetic oligonucleotide"
gcccaaaaggtggcgacgcatcctgtggcacag

SEQ ID NO: 43402 - DNA, 33 bp, Artificial Sequence
  source: /note="Description of Artificial Sequence: Synthetic oligonucleotide"
gcccaacttgccggcgtctcacatgccgcccaa

SEQ ID NO: 43403 - DNA, 33 bp, Artificial Sequence
  source: /note="Description of Artificial Sequence: Synthetic oligonucleotide"
gcacaattagcaggagtaagccacgcagcacaa

SEQ ID NO: 43404 - DNA, 33 bp, Artificial Sequence
  source: /note="Description of Artificial Sequence: Synthetic oligonucleotide"
gcgcagttggcgggggtgtcgcatgcggcgcag

SEQ ID NO: 43405 - DNA, 33 bp, Artificial Sequence
  source: /note="Description of Artificial Sequence: Synthetic oligonucleotide"
gcgcagttgaagaattcggattcgtatgcgcag

SEQ ID NO: 43406 - DNA, 33 bp, Artificial Sequence
  source: /note="Description of Artificial Sequence: Synthetic oligonucleotide"
gcccaacttaagaactcagactcatatgcccaa

SEQ ID NO: 43407 - DNA, 33 bp, Artificial Sequence
  source: /note="Description of Artificial Sequence: Synthetic oligonucleotide"
gcacaattattaggaggaagcgacagggcacaa

SEQ ID NO: 43408 - DNA, 33 bp, Artificial Sequence
  source: /note="Description of Artificial Sequence: Synthetic oligonucleotide"
gcgcagttgttgggggggtcggatagggcgcag

SEQ ID NO: 43409 - DNA, 33 bp, Artificial Sequence
  source: /note="Description of Artificial Sequence: Synthetic oligonucleotide"
gcccaacttatggggtctggggagggggcacag

SEQ ID NO: 43410 - DNA, 33 bp, Artificial Sequence
  source: /note="Description of Artificial Sequence: Synthetic oligonucleotide"
gcacaattaatgggaagcggagaaggagcacaa

SEQ ID NO: 43411 - DNA, 33 bp, Artificial Sequence
  source: /note="Description of Artificial Sequence: Synthetic oligonucleotide"
gcccaattacaaggagcagcattaccagcacaa

SEQ ID NO: 43412 - DNA, 33 bp, Artificial Sequence
  source: /note="Description of Artificial Sequence: Synthetic oligonucleotide"
gcgcaattacaaggagcagcattaccagcacaa

SEQ ID NO: 43413 - DNA, 33 bp, Artificial Sequence
  source: /note="Description of Artificial Sequence: Synthetic oligonucleotide"
gcacaattacaaggagcagcattaccagcacaa

SEQ ID NO: 43414 - DNA, 33 bp, Artificial Sequence
  source: /note="Description of Artificial Sequence: Synthetic oligonucleotide"
gcgcagatgcaggtgaatgggaatggggcgcag

SEQ ID NO: 43415 - DNA, 33 bp, Artificial Sequence
  source: /note="Description of Artificial Sequence: Synthetic oligonucleotide"
gctcagatgcaggttaatggtaatggtgctcag

SEQ ID NO: 43416 - DNA, 33 bp, Artificial Sequence
  source: /note="Description of Artificial Sequence: Synthetic oligonucleotide"
gcgcagatgtcgatgtcggtggggaaggcgcag

SEQ ID NO: 43417 - DNA, 33 bp, Artificial Sequence
  source: /note="Description of Artificial Sequence: Synthetic oligonucleotide"
gcccaaatgagtatgtctgtgggtaaggcacag

SEQ ID NO: 43418 - DNA, 33 bp, Artificial Sequence
  source: /note="Description of Artificial Sequence: Synthetic oligonucleotide"
gcccaaaatgcggttaatggtcgtcctgcacag

SEQ ID NO: 43419 - DNA, 33 bp, Artificial Sequence
  source: /note="Description of Artificial Sequence: Synthetic oligonucleotide"
gcgcagaatgcggtgaatgggaggccggcgcag

SEQ ID NO: 43420 - DNA, 33 bp, Artificial Sequence
  source: /note="Description of Artificial Sequence: Synthetic oligonucleotide"
gcacaaaacgaaggacacagcgcaaaggcacaa

SEQ ID NO: 43421 - DNA, 33 bp, Artificial Sequence
  source: /note="Description of Artificial Sequence: Synthetic oligonucleotide"
gcccaaaacgaaggccattcagccaaggcccaa

SEQ ID NO: 43422 - DNA, 33 bp, Artificial Sequence
  source: /note="Description of Artificial Sequence: Synthetic oligonucleotide"
gcgcagaatgggtttaataggtcggcggcgcag

SEQ ID NO: 43423 - DNA, 33 bp, Artificial Sequence
  source: /note="Description of Artificial Sequence: Synthetic oligonucleotide"
gcccaaaatgggtttaatcgtagtgcggcacag

SEQ ID NO: 43424 - DNA, 33 bp, Artificial Sequence
  source: /note="Description of Artificial Sequence: Synthetic oligonucleotide"
gcacaaaacaacggagtacacttaagggcacaa

SEQ ID NO: 43425 - DNA, 33 bp, Artificial Sequence
  source: /note="Description of Artificial Sequence: Synthetic oligonucleotide"
gcccaaaacaacggcgtccatcttcgagcccaa

SEQ ID NO: 43426 - DNA, 33 bp, Artificial Sequence
  source: /note="Description of Artificial Sequence: Synthetic oligonucleotide"
gcacaaaacccaaagagcataccaggagcacaa

SEQ ID NO: 43427 - DNA, 33 bp, Artificial Sequence
  source: /note="Description of Artificial Sequence: Synthetic oligonucleotide"
gctcagaatcctaagagtattcctggtgctcag

SEQ ID NO: 43428 - DNA, 33 bp, Artificial Sequence
  source: /note="Description of Artificial Sequence: Synthetic oligonucleotide"
gcacaaaacactttaagccacgcaaaggcacaa

SEQ ID NO: 43429 - DNA, 33 bp, Artificial Sequence
  source: /note="Description of Artificial Sequence: Synthetic oligonucleotide"
gcccaaaacacgctttcacatgccaaggcccaa

SEQ ID NO: 43430 - DNA, 33 bp, Artificial Sequence
  source: /note="Description of Artificial Sequence: Synthetic oligonucleotide"
gctcagcctgctgttagtggtggtcttgctcag

SEQ ID NO: 43431 - DNA, 33 bp, Artificial Sequence
  source: /note="Description of Artificial Sequence: Synthetic oligonucleotide"
gcgcagccggcggtgtcgggggggttggcgcag

SEQ ID NO: 43432 - DNA, 33 bp, Artificial Sequence
  source: /note="Description of Artificial Sequence: Synthetic oligonucleotide"
gcacaaccagaacacgcagtaaggactgcacaa

SEQ ID NO: 43433 - DNA, 33 bp, Artificial Sequence
  source: /note="Description of Artificial Sequence: Synthetic oligonucleotide"
gcccaaccggagcatgcggttcgtactgcacag

SEQ ID NO: 43434 - DNA, 33 bp, Artificial Sequence
  source: /note="Description of Artificial Sequence: Synthetic oligonucleotide"
gcgcagcctgggttggatacgacgagggcgcag

SEQ ID NO: 43435 - DNA, 33 bp, Artificial Sequence
  source: /note="Description of Artificial Sequence: Synthetic oligonucleotide"
gcccaacccggccttgacacgacgcgagcccaa

SEQ ID NO: 43436 - DNA, 33 bp, Artificial Sequence
  source: /note="Description of Artificial Sequence: Synthetic oligonucleotide"
gcgcagccggggttggatacgacgagggcgcag

SEQ ID NO: 43437 - DNA, 33 bp, Artificial Sequence
  source: /note="Description of Artificial Sequence: Synthetic oligonucleotide"
gcgcagccgatttcgacggcggcgtatgcgcag

SEQ ID NO: 43438 - DNA, 33 bp, Artificial Sequence
  source: /note="Description of Artificial Sequence: Synthetic oligonucleotide"
gcccaacccatctcaacggccgcctatgcccaa

SEQ ID NO: 43439 - DNA, 33 bp, Artificial Sequence
  source: /note="Description of Artificial Sequence: Synthetic oligonucleotide"
gcgcaaccaaggccagaaagcccaagcgcacaa

SEQ ID NO: 43440 - DNA, 33 bp, Artificial Sequence
  source: /note="Description of Artificial Sequence: Synthetic oligonucleotide"
gctcagcctcgtcctgagagtcctagtgctcag

SEQ ID NO: 43441 - DNA, 33 bp, Artificial Sequence
  source: /note="Description of Artificial Sequence: Synthetic oligonucleotide"
gcgcagccgacgaggtcggtgacggaggcgcag

SEQ ID NO: 43442 - DNA, 33 bp, Artificial Sequence
  source: /note="Description of Artificial Sequence: Synthetic oligonucleotide"
gctcagcctactcgtagtgttactgaggctcag

SEQ ID NO: 43443 - DNA, 33 bp, Artificial Sequence
  source: /note="Description of Artificial Sequence: Synthetic oligonucleotide"
gcccaacaacataagacggcccaagtcgcccaa

SEQ ID NO: 43444 - DNA, 33 bp, Artificial Sequence
  source: /note="Description of Artificial Sequence: Synthetic oligonucleotide"
gcgcagcagcataagacggcgcaggtggcgcag

SEQ ID NO: 43445 - DNA, 33 bp, Artificial Sequence
  source: /note="Description of Artificial Sequence: Synthetic oligonucleotide"
gcgcagcagacgggggtgttggcggcggcacag

SEQ ID NO: 43446 - DNA, 33 bp, Artificial Sequence
  source: /note="Description of Artificial Sequence: Synthetic oligonucleotide"
gcacaacaaactggagtattagcagcagcacaa

SEQ ID NO: 43447 - DNA, 33 bp, Artificial Sequence
  source: /note="Description of Artificial Sequence: Synthetic oligonucleotide"
gctcagcagactgttagtatgatgagtgctcag

SEQ ID NO: 43448 - DNA, 33 bp, Artificial Sequence
  source: /note="Description of Artificial Sequence: Synthetic oligonucleotide"
gcgcagcagacggtgtcgatgatgtcggcgcag

SEQ ID NO: 43449 - DNA, 33 bp, Artificial Sequence
  source: /note="Description of Artificial Sequence: Synthetic oligonucleotide"
gcgcagtcggcgtcgtcgaatcagccggcgcag

SEQ ID NO: 43450 - DNA, 33 bp, Artificial Sequence
  source: /note="Description of Artificial Sequence: Synthetic oligonucleotide"
gcacaaagcgcaagcagcaaccaaccagcacaa

SEQ ID NO: 43451 - DNA, 33 bp, Artificial Sequence
  source: /note="Description of Artificial Sequence: Synthetic oligonucleotide"
gctcagagtggtggtggtcctgttcgtgctcag

SEQ ID NO: 43452 - DNA, 33 bp, Artificial Sequence
  source: /note="Description of Artificial Sequence: Synthetic oligonucleotide"
gcacaaagcggaggaggaccagtaagggcacaa

SEQ ID NO: 43453 - DNA, 33 bp, Artificial Sequence
  source: /note="Description of Artificial Sequence: Synthetic oligonucleotide"
gcgcagtcggggttgcagccgaagatggcgcag

SEQ ID NO: 43454 - DNA, 33 bp, Artificial Sequence
  source: /note="Description of Artificial Sequence: Synthetic oligonucleotide"
gcccaatcaggccttcaacccaagatggcccaa

SEQ ID NO: 43455 - DNA, 33 bp, Artificial Sequence
  source: /note="Description of Artificial Sequence: Synthetic oligonucleotide"
gcacaaagcggaactttacaaagggcagcacaa

SEQ ID NO: 43456 - DNA, 33 bp, Artificial Sequence
  source: /note="Description of Artificial Sequence: Synthetic oligonucleotide"
gcccaatctgggacgttgcagagggctgcacag

SEQ ID NO: 43457 - DNA, 33 bp, Artificial Sequence
  source: /note="Description of Artificial Sequence: Synthetic oligonucleotide"
gcacaaagcataaacgtaagcagcgcagcacaa

SEQ ID NO: 43458 - DNA, 33 bp, Artificial Sequence
  source: /note="Description of Artificial Sequence: Synthetic oligonucleotide"
gcgcagtcgattaatgtgtcgtcggcggcgcag

SEQ ID NO: 43459 - DNA, 33 bp, Artificial Sequence
  source: /note="Description of Artificial Sequence: Synthetic oligonucleotide"
gcacaaagcaagagcgcaaacttaccagcacaa

SEQ ID NO: 43460 - DNA, 33 bp, Artificial Sequence
  source: /note="Description of Artificial Sequence: Synthetic oligonucleotide"
gcccaatcaaagtcagccaaccttcccgcccaa

SEQ ID NO: 43461 - DNA, 33 bp, Artificial Sequence
  source: /note="Description of Artificial Sequence: Synthetic oligonucleotide"
gcgcagtcgtcgggggattcgacgaaggcgcag

SEQ ID NO: 43462 - DNA, 33 bp, Artificial Sequence
  source: /note="Description of Artificial Sequence: Synthetic oligonucleotide"
gctcagagtagtggtgatagtactaaggctcag

SEQ ID NO: 43463 - DNA, 33 bp, Artificial Sequence
  source: /note="Description of Artificial Sequence: Synthetic oligonucleotide"
gcccaatcatcaggcgactcaacgaaggcccaa

SEQ ID NO: 43464 - DNA, 33 bp, Artificial Sequence
  source: /note="Description of Artificial Sequence: Synthetic oligonucleotide"
gcacaaagcagcggagacagcactaaggcacaa

SEQ ID NO: 43465 - DNA, 33 bp, Artificial Sequence
  source: /note="Description of Artificial Sequence: Synthetic oligonucleotide"
gcccaatcatcaggccaaggccaagtcgcccaa

SEQ ID NO: 43466 - DNA, 33 bp, Artificial Sequence
  source: /note="Description of Artificial Sequence: Synthetic oligonucleotide"
gcacaaagcagcggacaaggacaagtagcacaa

SEQ ID NO: 43467 - DNA, 33 bp, Artificial Sequence
  source: /note="Description of Artificial Sequence: Synthetic oligonucleotide"
gcccaatcaacgacgcttcaaaacgtcgcccaa

SEQ ID NO: 43468 - DNA, 33 bp, Artificial Sequence
  source: /note="Description of Artificial Sequence: Synthetic oligonucleotide"
gcacaaagcactactttacaaaacgtagcacaa

SEQ ID NO: 43469 - DNA, 33 bp, Artificial Sequence
  source: /note="Description of Artificial Sequence: Synthetic oligonucleotide"
gcccaaacggaaactcccgtctcacgagcccaa

SEQ ID NO: 43470 - DNA, 33 bp, Artificial Sequence
  source: /note="Description of Artificial Sequence: Synthetic oligonucleotide"
gcccaaacggaaacgcccgtctcacgagcccaa

SEQ ID NO: 43471 - DNA, 33 bp, Artificial Sequence
  source: /note="Description of Artificial Sequence: Synthetic oligonucleotide"
gcccaaacgggcgccgcctcacgacttgcccaa

SEQ ID NO: 43472 - DNA, 33 bp, Artificial Sequence
  source: /note="Description of Artificial Sequence: Synthetic oligonucleotide"
gcacaaactggagcagcaagcaggttagcacaa

SEQ ID NO: 43473 - DNA, 33 bp, Artificial Sequence
  source: /note="Description of Artificial Sequence: Synthetic oligonucleotide"
gcacagacgattaatccggcggtgagggcgcag

SEQ ID NO: 43474 - DNA, 33 bp, Artificial Sequence
  source: /note="Description of Artificial Sequence: Synthetic oligonucleotide"
gctcagactattaatcctgctgttcgtgctcag

SEQ ID NO: 43475 - DNA, 33 bp, Artificial Sequence
  source: /note="Description of Artificial Sequence: Synthetic oligonucleotide"
gcgcagacgattaatccggcggtgagggcgcag

SEQ ID NO: 43476 - DNA, 33 bp, Artificial Sequence
  source: /note="Description of Artificial Sequence: Synthetic oligonucleotide"
gcgcagacgccgtcgtcggcgtcgtcggcgcag

SEQ ID NO: 43477 - DNA, 33 bp, Artificial Sequence
  source: /note="Description of Artificial Sequence: Synthetic oligonucleotide"
gcacaaactccaagcagcgcaagcagcgcacaa

SEQ ID NO: 43478 - DNA, 33 bp, Artificial Sequence
  source: /note="Description of Artificial Sequence: Synthetic oligonucleotide"
gcccaaacgtctcatactatgagttttgcacag

SEQ ID NO: 43479 - DNA, 33 bp, Artificial Sequence
  source: /note="Description of Artificial Sequence: Synthetic oligonucleotide"
gctcagactagtcatactatgagttttgctcag

SEQ ID NO: 43480 - DNA, 33 bp, Artificial Sequence
  source: /note="Description of Artificial Sequence: Synthetic oligonucleotide"
gcccaaacgtcgactcagagtgtgaatgcacag

SEQ ID NO: 43481 - DNA, 33 bp, Artificial Sequence
  source: /note="Description of Artificial Sequence: Synthetic oligonucleotide"
gcgcagacgtcgacgcagtcggtgaatgcgcag

SEQ ID NO: 43482 - DNA, 33 bp, Artificial Sequence
  source: /note="Description of Artificial Sequence: Synthetic oligonucleotide"
gcgcaggtgcatgcgggggcggaggttgcgcag

SEQ ID NO: 43483 - DNA, 33 bp, Artificial Sequence
  source: /note="Description of Artificial Sequence: Synthetic oligonucleotide"
gcgcaggttcatgcgggggcggaggtggcgcag

SEQ ID NO: 43484 - DNA, 33 bp, Artificial Sequence
  source: /note="Description of Artificial Sequence: Synthetic oligonucleotide"
gcacaggtgcatgcgggggcggaggtggcgcag

SEQ ID NO: 43485 - DNA, 33 bp, Artificial Sequence
  source: /note="Description of Artificial Sequence: Synthetic oligonucleotide"
gcgcaggtgcatgcgggggcggaggtggcgcag

SEQ ID NO: 43486 - DNA, 33 bp, Artificial Sequence
  source: /note="Description of Artificial Sequence: Synthetic oligonucleotide"
gcgcaggtgaaggatgggttgacgtcggcgcag

SEQ ID NO: 43487 - DNA, 33 bp, Artificial Sequence
  source: /note="Description of Artificial Sequence: Synthetic oligonucleotide"
gcacaagtaaaggacggattaactagcgcacaa

SEQ ID NO: 43488 - DNA, 33 bp, Artificial Sequence
  source: /note="Description of Artificial Sequence: Synthetic oligonucleotide"
gctcaggttaaggatggtcttactagtgctcag

SEQ ID NO: 43489 - DNA, 33 bp, Artificial Sequence
  source: /note="Description of Artificial Sequence: Synthetic oligonucleotide"
gcgcaggttaaggatggtcttactagtgctcag

SEQ ID NO: 43490 - DNA, 33 bp, Artificial Sequence
  source: /note="Description of Artificial Sequence: Synthetic oligonucleotide"
gcccaagtgaataatcagtcggctaaggcacag

SEQ ID NO: 43491 - DNA, 33 bp, Artificial Sequence
  source: /note="Description of Artificial Sequence: Synthetic oligonucleotide"
gcccaagtaaacaaccaaagcgcaaaggcacaa

SEQ ID NO: 43492 - DNA, 33 bp, Artificial Sequence
  source: /note="Description of Artificial Sequence: Synthetic oligonucleotide"
gcacaagtaaacaaccaaagcgcaaaggcacaa

SEQ ID NO: 43493 - DNA, 33 bp, Artificial Sequence
  source: /note="Description of Artificial Sequence: Synthetic oligonucleotide"
gcgcaggtgaataatcagtcggcgaaggcgcag

SEQ ID NO: 43494 - DNA, 33 bp, Artificial Sequence
  source: /note="Description of Artificial Sequence: Synthetic oligonucleotide"
gctcaggttcgtgatggtattcctcctgctcag

SEQ ID NO: 43495 - DNA, 33 bp, Artificial Sequence
  source: /note="Description of Artificial Sequence: Synthetic oligonucleotide"
gcacaagtaagggacggaataccaccagcacaa

SEQ ID NO: 43496 - DNA, 33 bp, Artificial Sequence
  source: /note="Description of Artificial Sequence: Synthetic oligonucleotide"
gctcaagtaagcccaggaatggcaggagcacaa

SEQ ID NO: 43497 - DNA, 33 bp, Artificial Sequence
  source: /note="Description of Artificial Sequence: Synthetic oligonucleotide"
gcccaagttagtcctgggatggctggtgcacag

SEQ ID NO: 43498 - DNA, 33 bp, Artificial Sequence
  source: /note="Description of Artificial Sequence: Synthetic oligonucleotide"
gcacaagtagtaaacgaattaaggggagcacaa

SEQ ID NO: 43499 - DNA, 33 bp, Artificial Sequence
  source: /note="Description of Artificial Sequence: Synthetic oligonucleotide"
gcccaagtggttaatgagttgcggggtgcacag

SEQ ID NO: 43500 - DNA, 33 bp, Artificial Sequence
  source: /note="Description of Artificial Sequence: Synthetic oligonucleotide"
gcccaagtcgtcccccataacggccttgcccaa

SEQ ID NO: 43501 - DNA, 33 bp, Artificial Sequence
  source: /note="Description of Artificial Sequence: Synthetic oligonucleotide"
gcacaagtagtaccacacaacggattagcacaa

SEQ ID NO: 43502 - DNA, 33 bp, Artificial Sequence
  source: /note="Description of Artificial Sequence: Synthetic oligonucleotide"
gcccaacatgccaagatcatgtatgacgcccaa

SEQ ID NO: 43503 - DNA, 33 bp, Artificial Sequence
  source: /note="Description of Artificial Sequence: Synthetic oligonucleotide"
gcgcaggcggtgtcgtcgcaggtgtcggcgcag

SEQ ID NO: 43504 - DNA, 33 bp, Artificial Sequence
  source: /note="Description of Artificial Sequence: Synthetic oligonucleotide"
gcccaaggtcttagtgttgttaatatggcacag

SEQ ID NO: 43505 - DNA, 33 bp, Artificial Sequence
  source: /note="Description of Artificial Sequence: Synthetic oligonucleotide"
gcccaacgatcaatgcccacgctttcagcccaa

SEQ ID NO: 43506 - DNA, 33 bp, Artificial Sequence
  source: /note="Description of Artificial Sequence: Synthetic oligonucleotide"
gctcagcctgttaatactcagcgtgttgctcag

SEQ ID NO: 43507 - DNA, 33 bp, Artificial Sequence
  source: /note="Description of Artificial Sequence: Synthetic oligonucleotide"
gcgcaggtgtcgggggatgggtcgagggcgcag

SEQ ID NO: 43508 - DNA, 33 bp, Artificial Sequence
  source: /note="Description of Artificial Sequence: Synthetic oligonucleotide"
gcccaagatctgaataatcggccttatgcacag

SEQ ID NO: 43509 - DNA, 33 bp, Artificial Sequence
  source: /note="Description of Artificial Sequence: Synthetic oligonucleotide"
gcccaattgtctgagtcgagtcatggtgcacag

SEQ ID NO: 43510 - DNA, 33 bp, Artificial Sequence
  source: /note="Description of Artificial Sequence: Synthetic oligonucleotide"
gcacaagtaagcaacaacagcactttagcacaa

SEQ ID NO: 43511 - DNA, 33 bp, Artificial Sequence
  source: /note="Description of Artificial Sequence: Synthetic oligonucleotide"
gcacaattacaaggagcagcattacaagcacaa

SEQ ID NO: 43512 - DNA, 33 bp, Artificial Sequence
  source: /note="Description of Artificial Sequence: Synthetic oligonucleotide"
gcccaacttcgaatgccctcaaacgtcgcccaa

SEQ ID NO: 43513 - DNA, 33 bp, Artificial Sequence
  source: /note="Description of Artificial Sequence: Synthetic oligonucleotide"
gcgcagatgccgacgtcgcagccggtggcgcag

SEQ ID NO: 43514 - DNA, 33 bp, Artificial Sequence
  source: /note="Description of Artificial Sequence: Synthetic oligonucleotide"
gcgcagtatgagacgcagttgtcgcatgcgcag

SEQ ID NO: 43515 - DNA, 33 bp, Artificial Sequence
  source: /note="Description of Artificial Sequence: Synthetic oligonucleotide"
gcgcagacgaggattcagccgttgccggcgcag

SEQ ID NO: 43516 - DNA, 33 bp, Artificial Sequence
  source: /note="Description of Artificial Sequence: Synthetic oligonucleotide"
gcgcagccggcgccgtcggggaatacggcgcag

SEQ ID NO: 43517 - DNA, 33 bp, Artificial Sequence
  source: /note="Description of Artificial Sequence: Synthetic oligonucleotide"
gcccaagagcttcggatgtatagtgctgcacag

SEQ ID NO: 43518 - DNA, 33 bp, Artificial Sequence
  source: /note="Description of Artificial Sequence: Synthetic oligonucleotide"
gcccaaaaggaatcagtccccatctcagcccaa

SEQ ID NO: 43519 - DNA, 33 bp, Artificial Sequence
  source: /note="Description of Artificial Sequence: Synthetic oligonucleotide"
gcgcaggtgagggaggtgacgttggtggcgcag

SEQ ID NO: 43520 - DNA, 33 bp, Artificial Sequence
  source: /note="Description of Artificial Sequence: Synthetic oligonucleotide"
gcccaaatctcatcacaacttgcccttgcccaa

SEQ ID NO: 43521 - DNA, 33 bp, Artificial Sequence
  source: /note="Description of Artificial Sequence: Synthetic oligonucleotide"
gctcagagtcttggtcttactcagcatgctcag

SEQ ID NO: 43522 - DNA, 33 bp, Artificial Sequence
  source: /note="Description of Artificial Sequence: Synthetic oligonucleotide"
gcccaagatcttcggatgtatagtgctgcacag

SEQ ID NO: 43523 - DNA, 33 bp, Artificial Sequence
  source: /note="Description of Artificial Sequence: Synthetic oligonucleotide"
gcacaaactgtagcagcaagcaggttagcacaa

SEQ ID NO: 43524 - DNA, 33 bp, Artificial Sequence
  source: /note="Description of Artificial Sequence: Synthetic oligonucleotide"
gcccaagaagtctcagtcaacgtctccgcccaa

SEQ ID NO: 43525 - DNA, 33 bp, Artificial Sequence
  source: /note="Description of Artificial Sequence: Synthetic oligonucleotide"
gcgcagttgaatgcgttggcgacgacggcgcag

SEQ ID NO: 43526 - DNA, 33 bp, Artificial Sequence
  source: /note="Description of Artificial Sequence: Synthetic oligonucleotide"
gcgcaaggaactagcttaaagggaccagcacaa

SEQ ID NO: 43527 - DNA, 33 bp, Artificial Sequence
  source: /note="Description of Artificial Sequence: Synthetic oligonucleotide"
gcccaatttccatcaacgggcgtccgagcccaa

SEQ ID NO: 43528 - DNA, 33 bp, Artificial Sequence
  source: /note="Description of Artificial Sequence: Synthetic oligonucleotide"
gcgcaggatcatgcgtcggagtcgttggcgcag

SEQ ID NO: 43529 - DNA, 33 bp, Artificial Sequence
  source: /note="Description of Artificial Sequence: Synthetic oligonucleotide"
gcacaaagcgaattaagcaggcacttagcacaa

SEQ ID NO: 43530 - DNA, 33 bp, Artificial Sequence
  source: /note="Description of Artificial Sequence: Synthetic oligonucleotide"
gcgcagaatgtgtttaataggtcggcggcgcag

SEQ ID NO: 43531 - DNA, 33 bp, Artificial Sequence
  source: /note="Description of Artificial Sequence: Synthetic oligonucleotide"
gcgcaggcgcagattgcgacgaggatggcgcag

SEQ ID NO: 43532 - DNA, 33 bp, Artificial Sequence
  source: /note="Description of Artificial Sequence: Synthetic oligonucleotide"
gcacaaactcaaatggtaactccagcagcacaa

SEQ ID NO: 43533 - DNA, 33 bp, Artificial Sequence
  source: /note="Description of Artificial Sequence: Synthetic oligonucleotide"
gcccaacgatcatcagactcaaactgcgcccaa

SEQ ID NO: 43534 - DNA, 33 bp, Artificial Sequence
  source: /note="Description of Artificial Sequence: Synthetic oligonucleotide"
gcccaaacttatggtagtgaggggtcggcacag

SEQ ID NO: 43535 - DNA, 33 bp, Artificial Sequence
  source: /note="Description of Artificial Sequence: Synthetic oligonucleotide"
gcccaaatcaacgtcgccaaccgatcatcccaa

SEQ ID NO: 43536 - DNA, 33 bp, Artificial Sequence
  source: /note="Description of Artificial Sequence: Synthetic oligonucleotide"
gcgcagttgccgacgtcgccgttggatgcgcag

SEQ ID NO: 43537 - DNA, 33 bp, Artificial Sequence
  source: /note="Description of Artificial Sequence: Synthetic oligonucleotide"
gcccaagcgaagggtggtattaatggggcacag

SEQ ID NO: 43538 - DNA, 33 bp, Artificial Sequence
  source: /note="Description of Artificial Sequence: Synthetic oligonucleotide"
gctcagcagactgttagtatgatgattgctcag

SEQ ID NO: 43539 - DNA, 33 bp, Artificial Sequence
  source: /note="Description of Artificial Sequence: Synthetic oligonucleotide"
gcgcaggtgcatgtgggggcggaggtggcgcag

SEQ ID NO: 43540 - DNA, 33 bp, Artificial Sequence
  source: /note="Description of Artificial Sequence: Synthetic oligonucleotide"
gctcaggagagtaatcttgctgctcttgctcag

SEQ ID NO: 43541 - DNA, 33 bp, Artificial Sequence
  source: /note="Description of Artificial Sequence: Synthetic oligonucleotide"
gcgcatgtgcatgcgggggcggaggtggcgcag

SEQ ID NO: 43542 - DNA, 33 bp, Artificial Sequence
  source: /note="Description of Artificial Sequence: Synthetic oligonucleotide"
gcacaacccgcccttaagacggaccccgcccaa

SEQ ID NO: 43543 - DNA, 33 bp, Artificial Sequence
  source: /note="Description of Artificial Sequence: Synthetic oligonucleotide"
gcccaatctctgactacggtgggtcgggcacag

SEQ ID NO: 43544 - DNA, 33 bp, Artificial Sequence
  source: /note="Description of Artificial Sequence: Synthetic oligonucleotide"
gcccaagatagtaggtcgaatattactgcacag

SEQ ID NO: 43545 - DNA, 33 bp, Artificial Sequence
  source: /note="Description of Artificial Sequence: Synthetic oligonucleotide"
gcccaaccccgaggccaagacggctatgcccaa

SEQ ID NO: 43546 - DNA, 33 bp, Artificial Sequence
  source: /note="Description of Artificial Sequence: Synthetic oligonucleotide"
gcgcaggagttgaatacgtcgaaggatgcgcag

SEQ ID NO: 43547 - DNA, 33 bp, Artificial Sequence
  source: /note="Description of Artificial Sequence: Synthetic oligonucleotide"
gcccaatatcttggcgcctcacaacttgcccaa

SEQ ID NO: 43548 - DNA, 33 bp, Artificial Sequence
  source: /note="Description of Artificial Sequence: Synthetic oligonucleotide"
gcccaatatgagagtcgtatgcctaatgcacag

SEQ ID NO: 43549 - DNA, 33 bp, Artificial Sequence
  source: /note="Description of Artificial Sequence: Synthetic oligonucleotide"
gcacaaaggggaactcaaaaccacttagcacaa

SEQ ID NO: 43550 - DNA, 33 bp, Artificial Sequence
  source: /note="Description of Artificial Sequence: Synthetic oligonucleotide"
gcccaattgactgcgtcgcatattctggcacag

SEQ ID NO: 43551 - DNA, 33 bp, Artificial Sequence
  source: /note="Description of Artificial Sequence: Synthetic oligonucleotide"
gcgcagtatttgtcggataagaggacggcgcag

SEQ ID NO: 43552 - DNA, 33 bp, Artificial Sequence
  source: /note="Description of Artificial Sequence: Synthetic oligonucleotide"
gccaaagaacttaacacgtcaaaggacgcccaa

SEQ ID NO: 43553 - DNA, 33 bp, Artificial Sequence
  source: /note="Description of Artificial Sequence: Synthetic oligonucleotide"
gcacaattcagcactccaagcactactgcacaa

SEQ ID NO: 43554 - DNA, 33 bp, Artificial Sequence
  source: /note="Description of Artificial Sequence: Synthetic oligonucleotide"
gcccaaaatgttaattctcatatgggggcacag

SEQ ID NO: 43555 - DNA, 33 bp, Artificial Sequence
  source: /note="Description of Artificial Sequence: Synthetic oligonucleotide"
gcgcagatgccggtgtcgacgatttcggcgcag

SEQ ID NO: 43556 - DNA, 33 bp, Artificial Sequence
  source: /note="Description of Artificial Sequence: Synthetic oligonucleotide"
gcacaaagcatcggacaaggacaagtagcacaa

SEQ ID NO: 43557 - DNA, 33 bp, Artificial Sequence
  source: /note="Description of Artificial Sequence: Synthetic oligonucleotide"
gcgcaggtgttgagggagcagtcgttggcgcag

SEQ ID NO: 43558 - DNA, 33 bp, Artificial Sequence
  source: /note="Description of Artificial Sequence: Synthetic oligonucleotide"
gcacaaaggttagcagcaaacaacgtagcacaa

SEQ ID NO: 43559 - DNA, 33 bp, Artificial Sequence
  source: /note="Description of Artificial Sequence: Synthetic oligonucleotide"
gcacaaaacagggtaagcgaaagcgtagcacaa

SEQ ID NO: 43560 - DNA, 33 bp, Artificial Sequence
  source: /note="Description of Artificial Sequence: Synthetic oligonucleotide"
gcacaacaacacaacggagcacaattagcacaa

SEQ ID NO: 43561 - DNA, 33 bp, Artificial Sequence
  source: /note="Description of Artificial Sequence: Synthetic oligonucleotide"
gctcaggctagtcgtagtcttagtactgctcag

SEQ ID NO: 43562 - DNA, 33 bp, Artificial Sequence
  source: /note="Description of Artificial Sequence: Synthetic oligonucleotide"
gcgcagtttacgtcggggaatttgacggcgcag

SEQ ID NO: 43563 - DNA, 33 bp, Artificial Sequence
  source: /note="Description of Artificial Sequence: Synthetic oligonucleotide"
gcacaaactgtaagcaacaggactttagcacaa

SEQ ID NO: 43564 - DNA, 33 bp, Artificial Sequence
  source: /note="Description of Artificial Sequence: Synthetic oligonucleotide"
gcacaatatgaccacagcggaactaaggcacaa

SEQ ID NO: 43565 - DNA, 33 bp, Artificial Sequence
  source: /note="Description of Artificial Sequence: Synthetic oligonucleotide"
gcacaaaacgtaactagcgtaactgcagcacaa

SEQ ID NO: 43566 - DNA, 33 bp, Artificial Sequence
  source: /note="Description of Artificial Sequence: Synthetic oligonucleotide"
gcccaatcgcagcttgctggtgcggcggcacag

SEQ ID NO: 43567 - DNA, 33 bp, Artificial Sequence
  source: /note="Description of Artificial Sequence: Synthetic oligonucleotide"
gctcagagtcttcgtactcctatgcttgctcag

SEQ ID NO: 43568 - DNA, 33 bp, Artificial Sequence
  source: /note="Description of Artificial Sequence: Synthetic oligonucleotide"
gcccaaacgatgcgatcatcagtcacggcccaa

SEQ ID NO: 43569 - DNA, 33 bp, Artificial Sequence
  source: /note="Description of Artificial Sequence: Synthetic oligonucleotide"
gcccaaatgatctcatcatcacttgccgcccaa

SEQ ID NO: 43570 - DNA, 33 bp, Artificial Sequence
  source: /note="Description of Artificial Sequence: Synthetic oligonucleotide"
gcccaatcacgaatgccccttcccgaagcccaa

SEQ ID NO: 43571 - DNA, 33 bp, Artificial Sequence
  source: /note="Description of Artificial Sequence: Synthetic oligonucleotide"
gcccaagcccgacaatcatcagcccttgcccaa

SEQ ID NO: 43572 - DNA, 33 bp, Artificial Sequence
  source: /note="Description of Artificial Sequence: Synthetic oligonucleotide"
gctcaggctattactggtagtacttatgctcag

SEQ ID NO: 43573 - DNA, 33 bp, Artificial Sequence
  source: /note="Description of Artificial Sequence: Synthetic oligonucleotide"
gcgcagccggtgttggatacgacgagggcgcag

SEQ ID NO: 43574 - DNA, 33 bp, Artificial Sequence
  source: /note="Description of Artificial Sequence: Synthetic oligonucleotide"
gcacaaccaaacggattaagccaaccagcacaa

SEQ ID NO: 43575 - DNA, 33 bp, Artificial Sequence
  source: /note="Description of Artificial Sequence: Synthetic oligonucleotide"
gcgcagtattcggcgttgaatttgtcggcgcag

SEQ ID NO: 43576 - DNA, 33 bp, Artificial Sequence
  source: /note="Description of Artificial Sequence: Synthetic oligonucleotide"
gcgcaggagcatgcgtcgaggaatccggcgcag

SEQ ID NO: 43577 - DNA, 33 bp, Artificial Sequence
  source: /note="Description of Artificial Sequence: Synthetic oligonucleotide"
gcccaagggattacgcatcagacggtggcacag

SEQ ID NO: 43578 - DNA, 33 bp, Artificial Sequence
  source: /note="Description of Artificial Sequence: Synthetic oligonucleotide"
gcacaagcatatggattaccacaagacgcacaa

SEQ ID NO: 43579 - DNA, 33 bp, Artificial Sequence
  source: /note="Description of Artificial Sequence: Synthetic oligonucleotide"
gcacaaagcactccaactccaagcttagcacaa

SEQ ID NO: 43580 - DNA, 33 bp, Artificial Sequence
  source: /note="Description of Artificial Sequence: Synthetic oligonucleotide"
gcccaatcatcacatcttgtctcatcagcccaa

SEQ ID NO: 43581 - DNA, 33 bp, Artificial Sequence
  source: /note="Description of Artificial Sequence: Synthetic oligonucleotide"
gcgcagatttttcaggggatgccgaatgcgcag

SEQ ID NO: 43582 - DNA, 33 bp, Artificial Sequence
  source: /note="Description of Artificial Sequence: Synthetic oligonucleotide"
gctcagatgcagactgctcgtactcttgctcag

SEQ ID NO: 43583 - DNA, 33 bp, Artificial Sequence
  source: /note="Description of Artificial Sequence: Synthetic oligonucleotide"
gcacaatatactccaaggaacgcaccagcacaa

SEQ ID NO: 43584 - DNA, 33 bp, Artificial Sequence
  source: /note="Description of Artificial Sequence: Synthetic oligonucleotide"
gcccaaggcttttcaacgggcacgaacgcccaa

SEQ ID NO: 43585 - DNA, 33 bp, Artificial Sequence
  source: /note="Description of Artificial Sequence: Synthetic oligonucleotide"
gctcagcttcagtatactcctagtcgtgctcag

SEQ ID NO: 43586 - DNA, 33 bp, Artificial Sequence
  source: /note="Description of Artificial Sequence: Synthetic oligonucleotide"
gcgcaggcggtgaggtcgacgtcggcggcgcag

SEQ ID NO: 43587 - DNA, 33 bp, Artificial Sequence
  source: /note="Description of Artificial Sequence: Synthetic oligonucleotide"
gctcagactgaggttagtattcgtcaggctcag

SEQ ID NO: 43588 - DNA, 33 bp, Artificial Sequence
  source: /note="Description of Artificial Sequence: Synthetic oligonucleotide"
gcccaatatggtgttcagtcggcgactgcacag

SEQ ID NO: 43589 - DNA, 33 bp, Artificial Sequence
  source: /note="Description of Artificial Sequence: Synthetic oligonucleotide"
gctcaggctagtactggtagtacttatgctcag

SEQ ID NO: 43590 - DNA, 33 bp, Artificial Sequence
  source: /note="Description of Artificial Sequence: Synthetic oligonucleotide"
gcccaaaatactagtagtaaggatccggcacag

SEQ ID NO: 43591 - DNA, 33 bp, Artificial Sequence
  source: /note="Description of Artificial Sequence: Synthetic oligonucleotide"
gctcaggctggtagtcagggtgctcttgctcag

SEQ ID NO: 43592 - DNA, 33 bp, Artificial Sequence
  source: /note="Description of Artificial Sequence: Synthetic oligonucleotide"
gcgcagttgacgaggtcggagttgtcggcgcag

SEQ ID NO: 43593 - DNA, 33 bp, Artificial Sequence
  source: /note="Description of Artificial Sequence: Synthetic oligonucleotide"
gcccaatttgtgagtggttcgaatgcggcacag

SEQ ID NO: 43594 - DNA, 33 bp, Artificial Sequence
  source: /note="Description of Artificial Sequence: Synthetic oligonucleotide"
gcccaacttacgacgtcatatccctcagcccaa

SEQ ID NO: 43595 - DNA, 33 bp, Artificial Sequence
  source: /note="Description of Artificial Sequence: Synthetic oligonucleotide"
gcgcagtcgtcggtggcgattcagttggcgcag

SEQ ID NO: 43596 - DNA, 33 bp, Artificial Sequence
  source: /note="Description of Artificial Sequence: Synthetic oligonucleotide"
gctcagtttagtactagtcttagtcttgcacag

SEQ ID NO: 43597 - DNA, 33 bp, Artificial Sequence
  source: /note="Description of Artificial Sequence: Synthetic oligonucleotide"
gcacaaaagaacttacacgacactactgcacaa

SEQ ID NO: 43598 - DNA, 33 bp, Artificial Sequence
  source: /note="Description of Artificial Sequence: Synthetic oligonucleotide"
gctcaggctagtattagtgctggtattgctcag

SEQ ID NO: 43599 - DNA, 33 bp, Artificial Sequence
  source: /note="Description of Artificial Sequence: Synthetic oligonucleotide"
gcccaacgagtctcaaaccatgacggcgcccaa

SEQ ID NO: 43600 - DNA, 33 bp, Artificial Sequence
  source: /note="Description of Artificial Sequence: Synthetic oligonucleotide"
gctcaggagagtaatcttgctgctcgtgctcag

SEQ ID NO: 43601 - DNA, 33 bp, Artificial Sequence
  source: /note="Description of Artificial Sequence: Synthetic oligonucleotide"
gcgcagttgaatgcgccgcagtcgtcggcgcag

SEQ ID NO: 43602 - DNA, 33 bp, Artificial Sequence
  source: /note="Description of Artificial Sequence: Synthetic oligonucleotide"
gctcagagtgttggtatgcatggtgatgctcag

SEQ ID NO: 43603 - DNA, 33 bp, Artificial Sequence
  source: /note="Description of Artificial Sequence: Synthetic oligonucleotide"
gctcagaatactactcgtcctactcctgctcag

SEQ ID NO: 43604 - DNA, 33 bp, Artificial Sequence
  source: /note="Description of Artificial Sequence: Synthetic oligonucleotide"
gcccaaatccgacaagcccaaggcgccgcccaa

SEQ ID NO: 43605 - DNA, 33 bp, Artificial Sequence
  source: /note="Description of Artificial Sequence: Synthetic oligonucleotide"
gcccaacctacgaattttggtacggctgcacag

SEQ ID NO: 43606 - DNA, 33 bp, Artificial Sequence
  source: /note="Description of Artificial Sequence: Synthetic oligonucleotide"
gcgcaggcggattttccgaggcagtcggcgcag

SEQ ID NO: 43607 - DNA, 33 bp, Artificial Sequence
  source: /note="Description of Artificial Sequence: Synthetic oligonucleotide"
gcccaaaatggtaattctcatatgggggcacag

SEQ ID NO: 43608 - DNA, 33 bp, Artificial Sequence
  source: /note="Description of Artificial Sequence: Synthetic oligonucleotide"
gcgcagccgagggagcagtcgtcgccggcgcag

SEQ ID NO: 43609 - DNA, 33 bp, Artificial Sequence
  source: /note="Description of Artificial Sequence: Synthetic oligonucleotide"
gcccaagaggcgtctgggaatgctcgggcacag

SEQ ID NO: 43610 - DNA, 33 bp, Artificial Sequence
  source: /note="Description of Artificial Sequence: Synthetic oligonucleotide"
gcacaagaagcacaaagcaagaggccagcacaa

SEQ ID NO: 43611 - DNA, 33 bp, Artificial Sequence
  source: /note="Description of Artificial Sequence: Synthetic oligonucleotide"
gctcagagtagtagtaataatgttcgtgctcag

SEQ ID NO: 43612 - DNA, 33 bp, Artificial Sequence
  source: /note="Description of Artificial Sequence: Synthetic oligonucleotide"
gcacaaagcccaagcaagggagcagtagcacaa

SEQ ID NO: 43613 - DNA, 33 bp, Artificial Sequence
  source: /note="Description of Artificial Sequence: Synthetic oligonucleotide"
gcccaaatgcttacgacgtcaaagggcgcccaa

SEQ ID NO: 43614 - DNA, 33 bp, Artificial Sequence
  source: /note="Description of Artificial Sequence: Synthetic oligonucleotide"
gctcagcttgagcctagtagtcctcgtgctcag

SEQ ID NO: 43615 - DNA, 33 bp, Artificial Sequence
  source: /note="Description of Artificial Sequence: Synthetic oligonucleotide"
gcccaaatgactggtccgattactaatgcacag

SEQ ID NO: 43616 - DNA, 33 bp, Artificial Sequence
  source: /note="Description of Artificial Sequence: Synthetic oligonucleotide"
gcgcagtcgccgaataatacgacgggggcgcag

SEQ ID NO: 43617 - DNA, 33 bp, Artificial Sequence
  source: /note="Description of Artificial Sequence: Synthetic oligonucleotide"
gcgcagtcgtcgggggggaggacggtggcgcag

SEQ ID NO: 43618 - DNA, 33 bp, Artificial Sequence
  source: /note="Description of Artificial Sequence: Synthetic oligonucleotide"
gcccaagtcaacgtcacgaaccaatcagcccaa

SEQ ID NO: 43619 - DNA, 33 bp, Artificial Sequence
  source: /note="Description of Artificial Sequence: Synthetic oligonucleotide"
gcccaaacgtcaggcacggccatggccgcccaa

SEQ ID NO: 43620 - DNA, 33 bp, Artificial Sequence
  source: /note="Description of Artificial Sequence: Synthetic oligonucleotide"
gctcagagtagtatggctcttagtgaggctcag

SEQ ID NO: 43621 - DNA, 33 bp, Artificial Sequence
  source: /note="Description of Artificial Sequence: Synthetic oligonucleotide"
gcgcagccggtgaatacgcagagggtggcggag

SEQ ID NO: 43622 - DNA, 33 bp, Artificial Sequence
  source: /note="Description of Artificial Sequence: Synthetic oligonucleotide"
gctcagtttgttagtggtagtcatgctgctcag

SEQ ID NO: 43623 - DNA, 33 bp, Artificial Sequence
  source: /note="Description of Artificial Sequence: Synthetic oligonucleotide"
gcgcagcatgagtcgatgtcgaggttggcgcag

SEQ ID NO: 43624 - DNA, 33 bp, Artificial Sequence
  source: /note="Description of Artificial Sequence: Synthetic oligonucleotide"
gctcagagtcttggtcttactcagcaggctcag

SEQ ID NO: 43625 - DNA, 33 bp, Artificial Sequence
  source: /note="Description of Artificial Sequence: Synthetic oligonucleotide"
gcgcagcattttgattattcggcgccggcgcag

SEQ ID NO: 43626 - DNA, 33 bp, Artificial Sequence
  source: /note="Description of Artificial Sequence: Synthetic oligonucleotide"
gcacaagacttaagcactagcagcagggcacaa

SEQ ID NO: 43627 - DNA, 33 bp, Artificial Sequence
  source: /note="Description of Artificial Sequence: Synthetic oligonucleotide"
gcccaaaagaacgcccttacgggccccgcccaa

SEQ ID NO: 43628 - DNA, 33 bp, Artificial Sequence
  source: /note="Description of Artificial Sequence: Synthetic oligonucleotide"
gcccaaattactcagatggctgcgcaggcacag

SEQ ID NO: 43629 - DNA, 33 bp, Artificial Sequence
  source: /note="Description of Artificial Sequence: Synthetic oligonucleotide"
gcgcagatgaatgcgccgttgatgacggcgcag

SEQ ID NO: 43630 - DNA, 33 bp, Artificial Sequence
  source: /note="Description of Artificial Sequence: Synthetic oligonucleotide"
gcacaatatggaaagagcaacagcttagcacaa

SEQ ID NO: 43631 - DNA, 33 bp, Artificial Sequence
  source: /note="Description of Artificial Sequence: Synthetic oligonucleotide"
gcccaacattcaacgcccggccgagccgcccaa

SEQ ID NO: 43632 - DNA, 33 bp, Artificial Sequence
  source: /note="Description of Artificial Sequence: Synthetic oligonucleotide"
gcccaacttgagaatgctcgggggacggcacag

SEQ ID NO: 43633 - DNA, 33 bp, Artificial Sequence
  source: /note="Description of Artificial Sequence: Synthetic oligonucleotide"
gcacaacaaactagcactagtaacgcagcacaa

SEQ ID NO: 43634 - DNA, 33 bp, Artificial Sequence
  source: /note="Description of Artificial Sequence: Synthetic oligonucleotide"
gcccaatctgtgctttcggttaatgctgcacag

SEQ ID NO: 43635 - DNA, 33 bp, Artificial Sequence
  source: /note="Description of Artificial Sequence: Synthetic oligonucleotide"
gctcaggctgctgttagtagtattcctgctcag

SEQ ID NO: 43636 - DNA, 33 bp, Artificial Sequence
  source: /note="Description of Artificial Sequence: Synthetic oligonucleotide"
gcccaagtcgaagacgtccgacaacttgcccaa

SEQ ID NO: 43637 - DNA, 33 bp, Artificial Sequence
  source: /note="Description of Artificial Sequence: Synthetic oligonucleotide"
gcgcaggttattagtggtcgtgatgctgctcag

SEQ ID NO: 43638 - DNA, 33 bp, Artificial Sequence
  source: /note="Description of Artificial Sequence: Synthetic oligonucleotide"
gcccaaacgaagtcgcaggaggttagtgcacag

SEQ ID NO: 43639 - DNA, 33 bp, Artificial Sequence
  source: /note="Description of Artificial Sequence: Synthetic oligonucleotide"
gcccaaaagcctgcgtcgattcctaatgcacag

SEQ ID NO: 43640 - DNA, 33 bp, Artificial Sequence
  source: /note="Description of Artificial Sequence: Synthetic oligonucleotide"
gcgcagtatgcggtgcagtcgacgcatgcgcag

SEQ ID NO: 43641 - DNA, 33 bp, Artificial Sequence
  source: /note="Description of Artificial Sequence: Synthetic oligonucleotide"
gcacaaagcactaggactgtaataccagcacaa

SEQ ID NO: 43642 - DNA, 33 bp, Artificial Sequence
  source: /note="Description of Artificial Sequence: Synthetic oligonucleotide"
gctcagaaggctactggtcttactagtgctcag

SEQ ID NO: 43643 - DNA, 33 bp, Artificial Sequence
  source: /note="Description of Artificial Sequence: Synthetic oligonucleotide"
gcacaattaactaaccaaaggagcagcgcacaa

SEQ ID NO: 43644 - DNA, 33 bp, Artificial Sequence
  source: /note="Description of Artificial Sequence: Synthetic oligonucleotide"
gcacaagaccacggaaagagcggaggagcacaa

SEQ ID NO: 43645 - DNA, 33 bp, Artificial Sequence
  source: /note="Description of Artificial Sequence: Synthetic oligonucleotide"
gcccaagtttcgatgaattctcgtggggcacag

SEQ ID NO: 43646 - DNA, 33 bp, Artificial Sequence
  source: /note="Description of Artificial Sequence: Synthetic oligonucleotide"
gcccaacagccttcgcttaggcgggatgcacag

SEQ ID NO: 43647 - DNA, 33 bp, Artificial Sequence
  source: /note="Description of Artificial Sequence: Synthetic oligonucleotide"
gcgcagaggtcgaatcagaatgcgaatgcgcag

SEQ ID NO: 43648 - DNA, 33 bp, Artificial Sequence
  source: /note="Description of Artificial Sequence: Synthetic oligonucleotide"
gcccaacccggcgccggcgtccgagaagcccaa

SEQ ID NO: 43649 - DNA, 33 bp, Artificial Sequence
  source: /note="Description of Artificial Sequence: Synthetic oligonucleotide"
gcccaaactgggcgttctgatagtaatgcacag

SEQ ID NO: 43650 - DNA, 33 bp, Artificial Sequence
  source: /note="Description of Artificial Sequence: Synthetic oligonucleotide"
gcgcagtcgaattcggcgttgattgcggcgcag

SEQ ID NO: 43651 - DNA, 33 bp, Artificial Sequence
  source: /note="Description of Artificial Sequence: Synthetic oligonucleotide"
gcgcagccgattgcgtcggtgtcgccggcgcag

SEQ ID NO: 43652 - DNA, 33 bp, Artificial Sequence
  source: /note="Description of Artificial Sequence: Synthetic oligonucleotide"
gctcagcatactactaatactgaggttgctcag

SEQ ID NO: 43653 - DNA, 33 bp, Artificial Sequence
  source: /note="Description of Artificial Sequence: Synthetic oligonucleotide"
gcccaacagaagagtacttatagtcctgcacag

SEQ ID NO: 43654 - DNA, 33 bp, Artificial Sequence
  source: /note="Description of Artificial Sequence: Synthetic oligonucleotide"
gctcagcagactcagcatactggtcctgctcag

SEQ ID NO: 43655 - DNA, 33 bp, Artificial Sequence
  source: /note="Description of Artificial Sequence: Synthetic oligonucleotide"
gcgcagatggagaggatttcgattcatgcgcag

SEQ ID NO: 43656 - DNA, 33 bp, Artificial Sequence
  source: /note="Description of Artificial Sequence: Synthetic oligonucleotide"
gctcaggatagtggtaataagatgaatgctcag

SEQ ID NO: 43657 - DNA, 33 bp, Artificial Sequence
  source: /note="Description of Artificial Sequence: Synthetic oligonucleotide"
gcgcagtcggcggtgcataatggggtggcgcag

SEQ ID NO: 43658 - DNA, 33 bp, Artificial Sequence
  source: /note="Description of Artificial Sequence: Synthetic oligonucleotide"
gcccaatcagcctcacttcccatggccgcccaa

SEQ ID NO: 43659 - DNA, 33 bp, Artificial Sequence
  source: /note="Description of Artificial Sequence: Synthetic oligonucleotide"
gcccaaaaccttgcctcaacgtcacccgcccaa

SEQ ID NO: 43660 - DNA, 33 bp, Artificial Sequence
  source: /note="Description of Artificial Sequence: Synthetic oligonucleotide"
gctcaggttatgcatactcttgatgctgctcag

SEQ ID NO: 43661 - DNA, 33 bp, Artificial Sequence
  source: /note="Description of Artificial Sequence: Synthetic oligonucleotide"
gcccaaagtcagagtgggggtgatagggcacag

SEQ ID NO: 43662 - DNA, 33 bp, Artificial Sequence
  source: /note="Description of Artificial Sequence: Synthetic oligonucleotide"
gcccaagttgcgactattgttcgttctgcacag

SEQ ID NO: 43663 - DNA, 33 bp, Artificial Sequence
  source: /note="Description of Artificial Sequence: Synthetic oligonucleotide"
gcccaatcgcctcagcggaattctacggcacag

SEQ ID NO: 43664 - DNA, 33 bp, Artificial Sequence
  source: /note="Description of Artificial Sequence: Synthetic oligonucleotide"
gcccaagaagtctcagtcaacgtcgccgcccaa

SEQ ID NO: 43665 - DNA, 33 bp, Artificial Sequence
  source: /note="Description of Artificial Sequence: Synthetic oligonucleotide"
gcccaaacgggtactccgcggaatgatgcacag

SEQ ID NO: 43666 - DNA, 33 bp, Artificial Sequence
  source: /note="Description of Artificial Sequence: Synthetic oligonucleotide"
gcacaatatactgacaactatggagtagcacaa

SEQ ID NO: 43667 - DNA, 33 bp, Artificial Sequence
  source: /note="Description of Artificial Sequence: Synthetic oligonucleotide"
gcgcagttggatgggtcgccggcgagggcgcag

SEQ ID NO: 43668 - DNA, 33 bp, Artificial Sequence
  source: /note="Description of Artificial Sequence: Synthetic oligonucleotide"
gcacaaaacggaagcgacgcaagcttagcacaa

SEQ ID NO: 43669 - DNA, 33 bp, Artificial Sequence
  source: /note="Description of Artificial Sequence: Synthetic oligonucleotide"
gctcagaatgttggtcgtgagcagcctgctcag

SEQ ID NO: 43670 - DNA, 33 bp, Artificial Sequence
  source: /note="Description of Artificial Sequence: Synthetic oligonucleotide"
gcccaaccgcctgcgggtaatactcaggcacag

SEQ ID NO: 43671 - DNA, 33 bp, Artificial Sequence
  source: /note="Description of Artificial Sequence: Synthetic oligonucleotide"
gctcaggttactcctcattttcctagtgctcag

SEQ ID NO: 43672 - DNA, 33 bp, Artificial Sequence
  source: /note="Description of Artificial Sequence: Synthetic oligonucleotide"
gcccaagctactcatgctgcgagtccggcacag

SEQ ID NO: 43673 - DNA, 33 bp, Artificial Sequence
  source: /note="Description of Artificial Sequence: Synthetic oligonucleotide"
gcccaatcaaacgtcaaggtccttgccgcccaa

SEQ ID NO: 43674 - DNA, 33 bp, Artificial Sequence
  source: /note="Description of Artificial Sequence: Synthetic oligonucleotide"
gcccaaaacgccgccaaggccgtccttgcccaa

SEQ ID NO: 43675 - DNA, 33 bp, Artificial Sequence
  source: /note="Description of Artificial Sequence: Synthetic oligonucleotide"
gcacaaactgacaagccacacagccaagcacaa

SEQ ID NO: 43676 - DNA, 33 bp, Artificial Sequence
  source: /note="Description of Artificial Sequence: Synthetic oligonucleotide"
gcccaatcagccacgtcaaactttcttgcccaa

SEQ ID NO: 43677 - DNA, 33 bp, Artificial Sequence
  source: /note="Description of Artificial Sequence: Synthetic oligonucleotide"
gcgcagaatttgagggcggaggtggtggcgcag

SEQ ID NO: 43678 - DNA, 33 bp, Artificial Sequence
  source: /note="Description of Artificial Sequence: Synthetic oligonucleotide"
gcccaaaacgaacgatcaatcgaatcagcccaa

SEQ ID NO: 43679 - DNA, 33 bp, Artificial Sequence
  source: /note="Description of Artificial Sequence: Synthetic oligonucleotide"
gcacaatatccaaacgacgcaaacccagcacaa

SEQ ID NO: 43680 - DNA, 33 bp, Artificial Sequence
  source: /note="Description of Artificial Sequence: Synthetic oligonucleotide"
gcccaagcctcacttctttcacaacccgcccaa

SEQ ID NO: 43681 - DNA, 33 bp, Artificial Sequence
  source: /note="Description of Artificial Sequence: Synthetic oligonucleotide"
gcacaagaattcaacactagggacgcagcacaa

SEQ ID NO: 43682 - DNA, 33 bp, Artificial Sequence
  source: /note="Description of Artificial Sequence: Synthetic oligonucleotide"
gcccaagagcttgtgagtagtctgggggcacag

SEQ ID NO: 43683 - DNA, 33 bp, Artificial Sequence
  source: /note="Description of Artificial Sequence: Synthetic oligonucleotide"
gcccaaagtgcgcaggcttatactgaggcacag

SEQ ID NO: 43684 - DNA, 33 bp, Artificial Sequence
  source: /note="Description of Artificial Sequence: Synthetic oligonucleotide"
gcccaaatgtcaacggaatcacatggcgcccaa

SEQ ID NO: 43685 - DNA, 33 bp, Artificial Sequence
  source: /note="Description of Artificial Sequence: Synthetic oligonucleotide"
gcccaatcacaaaacatgtcaaacatcgcccaa

SEQ ID NO: 43686 - DNA, 33 bp, Artificial Sequence
  source: /note="Description of Artificial Sequence: Synthetic oligonucleotide"
gcccaagtgggtaatgataatcggtcggcacag

SEQ ID NO: 43687 - DNA, 33 bp, Artificial Sequence
  source: /note="Description of Artificial Sequence: Synthetic oligonucleotide"
gcgcagttgcagtcgtcgaataatccggcgcag

SEQ ID NO: 43688 - DNA, 33 bp, Artificial Sequence
  source: /note="Description of Artificial Sequence: Synthetic oligonucleotide"
gctcaggatagtgctcctcttcgtagtgctcag

SEQ ID NO: 43689 - DNA, 33 bp, Artificial Sequence
  source: /note="Description of Artificial Sequence: Synthetic oligonucleotide"
gcccaaatgggcggcacgatcatgtcagcccaa

SEQ ID NO: 43690 - DNA, 33 bp, Artificial Sequence
  source: /note="Description of Artificial Sequence: Synthetic oligonucleotide"
gcgcagcattatacgtcgggggcggaggcgcag

SEQ ID NO: 43691 - DNA, 33 bp, Artificial Sequence
  source: /note="Description of Artificial Sequence: Synthetic oligonucleotide"
gcccaatcagtcggcatgaactataaggcccaa
